United States Patent Application Publication US 2026/0191916 A1 - sequence listing, part 97

SEQ ID NO: 621 - DNA, 636965 bp, Phocaeicola vulgatus
  source 1..636965: mol_type = genomic DNA
aactgttgactattttttttctaatttgcttgaaagaacaatgccaacattgatattattttgaattcaatacgctttaacaaatcggattgtaaccttatattttataattaaaattttgtagtatgaaatcatttgtaaggaaattgtgcgccggattggtgtgtgcatgtggaatgtctgtttctgtttatgcaacagattattatgtggcaactgatggaaatgacatgaatgtaggtagcattgaaaaaccttttgcaaccttgtctaaagctctaaagttggttcaacctggtgataatatatatctgcgtggaggagaatataatgttactgaagattggataatggataaaagtggaaataaaacttatgctaaagtgtttgatattaaacaaaagggcaatccatcaagtccaatttgtgttattggctataagaatgagcgtccggtacttaatatggagcaaatcaaacttacagatcgtcgtgttgccgtattctatattgctggtagctattggagattcaagaattttgaagttgtaggcactcaagtagcaattaaaggtcatactcagtctgaagtttttcgtattgagggaggaaataataatatattggaaaatatagatgtacatgatggtatggcaattggcttttatttggtaaaaggtatgaataatttagttttgaattgtgacgctcatgataattatgatggatattctgaaggtgattctggaaatgtagatggatttggagggcatgcaaataaggaaactagtactggaaatatatttagaggttgtcgggcttggaacaatggagatgatggttttgatttgattaattgttatgcttcatatattatagagtattgttggtcatttcgtaatgggtataagccccattctatagaatcttctggtggaaatggagctggttttaaatctggtggatatggtatgggagacataaaaaaggttccaaatccgataccgcaacatacagtgcgttattgtttagcatattataatcgtcagcaaggattctattctaatcatcatcttggaggattgattttcgaaaacaatacggcttataaaaatccaagtaattataatatgttgaatcgaaaatcgtcaaatgaggctgttgatgtacctggatatggacatattattaaaaataacttatcattaagtcctcgtaattcgggaggttttccacaacatttaattaatgtagataataccctttctgaaattaaaaacaattcatttgcaccaaatgatttgaatttatcagagtctgattttgaaagtttgaatgaacaagaattaatgggatctcgtaaatctgacggaagtcttcctgatataaattttttacgcttgacaaatcatgcaaattttcgtttttctggtatgggctgctttataaatgaagaggctgttgattatagttggatacaagaacctgctattgtattggaaaacggagtggctcgtattgttggtgaagactctaaatcttttaataaattttacgttaatggagaagaagtaagtatagagaatggaattgtggatttgacttcaatgagtggtgaattaaatttgaaagcaataagtgaaaatggagcggttacaactcttattattaataaatgataaatattcatgctatgagaaacttttttaacaatctgtttttctatcttttatttttaggaataggtactaatgtgttaacctcttgcaaggaagaggtggagagtatatctgagttatctcttgaacaaactaaaattcagataaaagaaggagagacagttactgtgaaaataattggtggaagtggaaattatcagatttctttatcagatgagaaattagctgttgcacagatagaaaataatgagataaatatccgtgcattattgacaggttgtgtaactttaactgttactgatgagaacggtcaaacagcacttcttaatattattattatctctaaaatactggattcagataaaccaaggtttgtttggacaaatagtattgctctagatgaacctaacggttggggattgacagtttttgggaataaggttgctgttacttcttgtgtggaacagattcaatatgtattagaatgggagggagattctacaatggggaagaagttaaatgcttttttaactactttaaaaaagggggaagctcctgttaaaataaaattaactggacttgaaatattagatattagggaacaatgttactttattactttttctgttgataataagattggtgaacttgtttttataaaatagtcattaattcttttaagttatttttattaatgattgatttgcttcaatttgacgtgacgctaatgttgacaatactttggtaaaaaattgctgaagtattgtcattgaatttgcgtaagttttaccaatgaaaacggtaggggcttagttaatcaagaaaaatatgatgcaaaacttgggaaatgaaatactgatatatggatttttcaattgaaaacaatttgagcaatccatatattagtattttttttaagtcacatcttttataaagttaatagtttctaggttgaagttcttagacatcattcatctaataaagaccattattgggattatgcaggaatgtgcaggttttattattattaaagatacccaaagtacatattgggaatatgccaagatgttcagtcaataacatggtaatacggaaaatcttcttcttttttatagatttatacactccttaaattcccaataagcatcaaacatctgttgactaagcatacaaatctaataattgagtcttagttctcaatcatgtcagatcattgtttggactaaaattctccctatttttataaagggtattctactttaaaagaagaactatagtaaagatccatcataaagtttttagttttttatttctgctttcattttgtatattcatacttgaaaaataaaaatacttttaagaatcgtatcctatctttcctatgcttaaaaagttatttaaaagaattcgatgtaatgtcaaattatcgtcaaggggaaggtgtatcaaaaagcataccttcttttttatgggagcagtatatcagtgaaaaaatctaggatatatagagaatagttggtttaaagtgaacaattaaccatataaatggataaaattctatttgatataatttctctcatgcataaatttgtcgtatcagataaaaaatgacatgctatgagaaagacatttttagctattacattatttttagcttttagtaaagccgcattggctcagtttggaaactgcactgcatcggaaatgcggacttatgtagatagtgcgaccggcaatactatcactatgttgaccgacacgatgaagaatgaccgttttctttatcagactgatcccatgtggacggctgatggcaaatacttattgttcaggtcttccagccgtggaaatgacaaagaggtggaaagtacgcttcctaacggagaaaaacgtaaatggactcctacacagatttactttattgaaatggccaccggtaagattattcaagctacggaaggaccgaacttgggcagtgcttttttggctaataaaacgaatcgtatgtttgtcagccggaaagaaaaagaaaactggaacatgtatgtaatggacttgaataaattctttgccgatgtaaaacaaggaaaagtaggtaaaccatccgcttatgaaactttcataggaactttccccactgagatgggacgtccgggaggatatgctgtggattgtaatgatgattatgcctacataactgttgagcgtgagggtacggaagaggaaaaggaacgtatgatgaaaaacgctttcctgcctgaaagtaaccagccggtaaagataaagccaactctttgcggaattcgtaaaatgaatctcagtacgggagaagtaactaaggttattgatacggagtttaaaacaggacatatacaagccagccgttttactccgggtgaaatcgttttttgtaacgaaaccggtggcgatgcccatcagcgtatgtggttttgcacggcagatggaacagtctttaaacctttatataaagaaactccgctagattgggtgactcatgaaacttttgcaaccaaagattttgtatatttcaatatcttaggatttcagccgcgtcttcgcaaacaggcaagtggtattgtgcgtatcaatttgcgtacggatgatgtagagttgatagggcaggtggaattagaaaaagaccgccaagcgattgacggccaattggtaggaagaggtttctggcattgtaatgccagccgtgataataaatgggctgccggagatacttttggaggaaatgtatggttggttaatgtacagaccggggagcgtcattggttggcgtcggataccaagatgaaaccggatcatgcacatcccagctttagtccggatggtacgaaagttcttttccaatccggacattttacaaatggaaaaagattgaatttaatgatggtggatatttcatcctttaaataaagtaaggttggatatgaaaaatacacgtaagatattattttccgcagctttgttgtcttcagggcttacgatggcccagactacaacggcagagaaatcgcccaatgttatttatattatggcggatgatttgggaataggtgatttgggatgctatggtcagcgtcagattaagacaccgaatattgatgggatagctcagaacgggatgaagtttatgcagcattattccggttctacggtcagtgctccgtcccgttgtgctctgattacaggaaagcatatgggacatgccgcaatcagaggaaatgcaaaagtggcaggttcggatggattgttatatgaaactccgcttcctgccggtgaagttaccgtagccgatatttttaaaacaaagaattatgttaccggatgtgtaggcaaatggggaatgggaggaccgggtacggaaggtatgcccggcaaacatggttttgattatttctacggttatctggggcaacgttttgctcatagttattaccctgagtttttgcatgagaatgagcagaagattatgctggatgggaaatattattcgcatgacttgatgttggaaaaggctttgaattttattgatgaaaatgcgcagaaacctttcttcctttatttttcaccgaccataccccatgcggatcttgatataatgggggaagcgatgacggagtatgagggggaattttgtgaaactccttttggaggaagcagagacggttataaatcgcagcaaactccgcgtgcggcgtatgcggcgatggttacttatttggataaaagtgtgggtttgattattaaagagttgaaagagaaaggtttgtatgatcatacgatcattgtttttacttccgataatggagtccattcggagggagggcacgatccatcttattttgacagtaatggtccgttcagaggccagaaaagagatttatatgaaggaggtatccgtactccgttcgtcattcaatggccgggagttattccacaaggggtagttaccaatcatatttctgcattttgggattttttgcctactataggtgaattggtgcaggcggatattcctcaaaatattgatggtatatcttatttgcctactcttacgggaaaaggtactcagaaggagcatgattgtatttattatgagttctttgaatttggaggaaagcaatctattatgacacctgatggttggaagttggtgagactggaagttagtgattcgtctaaaacttatgaagaattgtataacatttatacagatccggcagaaactactaatgtgataaagcaatatcctgatgtggcaaggaaattaaagaatatgataggtggtcaacgtgttgaaaatgcccgtttccatttttaaacaagtaagatttatgaagcaatccttatttttaaagaaatgcagtaagttctgttatgtactttttgcagtttgtggctgtttggcttgtacacagaatcagaagattgaatggccgcaagtgactaacgagaccaagccttggacgcgatggtggtgggaaggcaatgcggtcaggactactgacttggatacggttatgcgtaagtaccaggaggcaaatctgggtggattagagatcactcctatttatggaatacatggttatgaggaccgctttaaagattttctttcttcggaatgggttgatttgtttctgtatactttgcaggaagcaaagcagttggggttaggaattgatttggctaatgcttcgggatggccgtttggaggaccttgggttactcccgaagatgcgtgcaagacggtgggttataaaacttatcaattgaaagaaggcgaacaattaggtgaacctgtccgatataaggaagaaggctttgtcagattggcagggcatactccggtaaaactggaggatttgaaagaaccggtcagtgcgaatgctgatttacagacattggcattggatcaggtacgatataaaaaggaactgcctttgattatagtgaccgctaatagtgataaaggtgaatgtctcgacttgacttcaaaaataaagccggatggtacattggactggacggctcctcaaggtgactggactatttgcgctctgttccaaggtcatcatggaaaaatggtagaacgtgcaggacctggtggtgaaggtgatgtgatagatcatttttcagcttcggccattgatcattatctcagtaaatttgatgaggcttttaaaggaaaggatatcagttatctgaggtattattttaatgactcttatgaagtggacgatgcaagaggcgagtcgaattggactcctgctttttttgacgaattccaaaaatataggggatatgacttgcgtcagcatttacccgcattgttaggtatggatacaccggacaagaatgcaagggtgttgtatgattatagacaaaccataaacgatttattgataaatcattattctattcgttggcaacattgggcggcaaaacaaggaaagggtataaggaatcaggctcatggttctcctgccaatattctggatttgtatgcagtgagtgatgtgcccgaaatagaggggcgtgatttggtcagtataaaagcagctccgtctgtagctcatacggaaggaaagaaactctcatcttcagaaagtgcgacttggctggatgaacattttcaatcgaatctgggagatgtaaagaaagcgcttgaccttttctttctgggtggggtgaatcatattttttatcatggcacttgtttcagtccgcaggaggctccctggccgggatggttattttatgcggcagtccattttcatccgaataatccgttttgggaggattttaaatatttgaatcagtatgttactcgcgtgcagtcatttttacaggatggcactcctgacaatgatgttcttttatactataacatagccgatgtgatgtctgaacaagggaacagaagtcttcagcattttagcggattggatcgtaatatgttggaatcttcggtcagagaaagtgcggtaactttaacagagaatggttatgcgtgggatatgatttctgacaagcaacttcttaaaactaatattgagaaagaaatgattgtaacgcccggtgccgcatataaaaccgttcttgtttcggcggcgcaatatattccttatgaaacaatggaaaaactgatggctttggctgatgaaggtgctaccgttgtgttttataagggaattcctcaagatatggccggaatgattctttcggaagagaaacaggctcattttaaagaaatgctggatgctttggactttcatgctgaaggtgctgttaaatgtgcacgggtaggtaaggggaagatttgtttgtcagatgatattaatgctctgatggatgaggcgaatgtgggtgctgagaaaatgtatcaggcaggtctgcaatgtatccgaagaaatagtgcgacgggaaaatattactttatagaaaatagtagcgaccgtaaaatagaggattggattccacttcgtacagaagctcggagtgcggcgattttcaatccaatgactggtgctagtggtttggctgctatgaaacgcaatgacgggcaaacagatgtttatctggaattgaatccgggtgaaactgtcattgtatcaacttccggtcagcattttacaggagatgcctatgcttattatcaaaatgcaggtgagcccaatcctgtttccggcagttggactgtttcttttgttcaaggaggtcctcaacttcctgcttctataacggttgacagtttgggctcatggactgattttgtaggggatgaatataaagctttttctggaacagccgtttatacgactactataaataaggtgcctgtagcggatgtgatcaaattggatcttggctctgtagcggaaaatgcatctgtctatttgaatggagattatatcggtacagtgattgactctccttatcaattgtatatccctgctgaaaaattcaaaggacaggatgagttagttgtcagagtagccaactctatggcgaatcgaattgcttatatggataagaagggagtggactggaagattttctataatgtaaatatgtctgcaagaaaaaaggaaaatgtgaaaaatggtatctttgatgcttctgattgggaaccaaaatcttcagggctattgggacctgtaacgttgactccggctatggtgaagcaatgaattatatagtcctgatgttgcaacctatagaataaatgtttcagggtatttgtgtaatatgttgagtattaatgtgatatgtgaatatgcgcaacatgaataccctgaaatttcgttttgaacgaatttctatataaatgtatcttattctatggtaggcaagaggactttatgctagttttgcaacaaacaatttgagatagctatgagaaacaaaattcttttatttttattgacttttataggaataagtcagattgcggcagcatcatctgtccgtgataaatacaattttaattctgaatggttactttatgttggcgatataccggaagccaaagaggtacgttttcaggatgcggattggaaaaaagtaacattacctcgtccttttaatgaagatgaggcttttcgtttgagtatagagcaattgacggatactgtgatgtggtatcgtaaacatttccgtctgcctgccggcagcaagaacaaaaaagtctttgttgaatttgaaggtgtccgtcaaggagctgatttttatatcaatggcgaatatatcggcttgcatgaaaatggcgcgatggctgtaggtttcgatttgactccttatattaaatatggacaggagaatgtcatggcggtccgtattgataacaattggaattataaggaacgtgctacaggtaccaaatatcagtggagtgaccgtaatttcaatgccaattatggaggtatacctaagaatgtgtggcttcatgtaaccgataaggtttatcagacacttcccttgtacagtaatttaaaaactaccggggtttatatctatgcggaagatatccgtgtgaagtctcgtaaggctgtggttcatgcggagtctgaaataaaaaatgaatataatcgggataagaaagtcgcttataaggttgaagtgtttgatcgtgacgggaaaagcataaaaagttttgagggtactcagacgatagtaaaaccgggtgaaactgcgactttggaagcttcggcagaaatagacggacttcatttctggagttggggatacggatatttgtacacagtaaaaaccagtttatgggtggatggcagaaaagtagatgaagtggctacccgtaccggtttccgtaaaactcgtttcggcagaggaatgatttggttgaatgaccgggtgattcagatgaaaggttttgcacagcgtaccagtaatgaatggccgggagtcggtatgagtgttcctgcatggttaagtgattatagtaatggcttgatggtggaagataatgccaacttggttcgttggatgcatatcaccccttggaagcaggatattgaatcgtgtgaccgtgtcggattgattcaggcaatgcaggccggtgatgcagaaaaggatcgtgaaggccgtcaatgggaacaacgtacagaattgatgcgtgatgccattatttacaaccgtaataatccgagtattttgttctatgaatgtggaaacgaatcaatcagtcgtgaacacatgatagaaatgaaagcgattcgtgataagtatgaccctcatggaggccgtgccatcggttcccgtgaaatgcttgatattcgtgaagccgaatatggtggcgagatgctttatatcaataagagcaaacatcatccgatgtgggctatggaatactgccgtgatgaaggtctgcgcaaatattgggatgaatattcttatccatatcataaaaacggagaaggaaataactcattccgttctgcaatgactaataaggttcagaaaaaggtggatgcccgtgcttataatcacaatcaggattcctttactattgagaatgtgattcgttggtttgattattggcgtgaacgcccgggtaccggtgaccgtgtcagctcgggaggtgtgaaaatcatcttctcggatacgaatacacattatcgcggtgtggagaattatcgtcgtagtggtgtgacagatgccatgcgcatccctaaagatcctttctatgcacatcaggtgatgtgggacggatgggtggatatagagaatccccgtattcatatcgttggtcattggaactataaagaagatgtggtgaaacctgtttatgtggtatccagtgctgaaaaagtggaattgttcctgaatggtaaatctttaggaaacggtcaaagagattatcatttcttgtatactttcaaagatgtggcatttgttccgggcaagttggaagctgtagggtatgataagaatggaaaagaatattgccgcgctgaattgcagactgccggcaagccggaacagattaaactcagtgtgattcaaagccctaaaggctggaaagcggatggagctgatatggtattgcttcaagtggaagtgatggataaagatggcagacgttgcccgctggctaatgatctgatacattttgacgtagagggaccggctgaatggcgtggtggaatagcacagggcaaagataattatattctttcaaaagatttgcctgtagaatgtggaatcaaccgggctttgatacgctctcttacgactccgggaacagttcgtataacagccaaggctgatggattgcaatctgccgaaatcagtctttcttccgcaccggttgaagtgaagaatggcttgagcaattatattccgggagatgaactggagggcaggctgacccgtggagaaactccgttgactccttcttacaaggatacgaaagtcgatgtgaatatcttatcggcggttgccggagccaaccaggatgaagcgataaaaagtttcgatgataatgaattgagtgaatggaagaatgatggcagactgaacagtgcatggataacttatagtttggaacgtgcggcccgtgtggatgaaatttgcatgaaacttaccggttggcgtttgcgtagctatcctttggaaatatatgcaggtgatgaactgatttggagtggtgaaactgaaaagagtttgggatatatccacctgaatgtaaaacctgtattgacaaatgagataaccattcgtttgaaaggtgccagcaaggaaggtgacggtttcggacaaattgtagaagttgctgcccctgctgcgggtgagttggatttgtttaaggcaaaaaatggcgataaaaccaatcacgagttacgcattgttgaaattgagtttaaagagaatttgtggcaatagagatgtggatattttttagaggtaaagattgatagacaggagtttcttttttaagtagataggcggggaaactccccgcttgtattaaggttttataaattgttagatgaaacattgggttatgatgaatatgcttctgcttgtcggaagcatattcgctttctcccaaccttatagtggagaaaagctttcaagaggattgattggaattcctacagaggaaggaatgtattttagctggcgcatgaccttggaggatgcagccggattacaatttgatttataccgtagttccaatggaggtgcggaggtaaagttaaataaagaaccaatagatcggacttccgattttttagatcgcacggttgattacacggtggataatcgttggactttaaaagcaactaccggggaagttgctacctggactcgtctgaagggagaggaacggaatccttatttaagtattcctatttgtaaaccggaagacggagaaatagcaggtgagccatttacttatacagctaatgattgtagcgtgggcgatctggatggtgatggagagtatgagattattttaaaatggtctccttctaattcaaagcgaccgccacagcggggctttaccggtaatacctatttggatgcatataaaatggatggaaccaggttgtggcgtattgatttggggccgaatgtacgttccggagcagccacgactaattttctggtctttgattttgatggagatggatgtgcggaaatttgttgtaaaacgggagatggtactgtcgatggactgggacatcggataggagatgcccaagtcgactggaggacatgggataaaaagagtcctacgtatggtaagatagtaaatggtccggaatatctcacggtttttgaaggacgtaccggaaaagaactggattcgaaagaatatattccaacccgttatcctttggatggttggggaggtgtaggtggcaattgtggtaatgacaatactggtggtcgttcagaccgttttacagccggagtagcttttctggatggaaaaacgccttcacctgtcatggtaagaggatggtacggacggacggtggtagctgcatggacttttacaaacggggcattgaaacatacatggacttttgatagcgcggcaccgggttgggagacctattcgggtatgggaaatcatagtgtgaccgtagcggattttgatggtgatggttgtgacgaaatctgtgtgggggctatgactgtagaccatgacggtaaaggactgtttactacgggcttgcgtcacggggatgccttgcatgccggacgttttattccttcccgtcaaggtatgcaggtttttggcgtgcatgaaaatgaaggcgataatgaaattgtaaagcgtactcctgccgtagctatgtttgatggagcgaccggagaaattatctggcaggatggcttgggacaagatgccggccgtggagtagctgccgatatcgatccgcgttatgatggagcagagtgttggtgcaatataggaggtttgagaagaggggacaccggagaaataatctgtaatagaaagcctgattcctgcaattttaccatttattgggacgctgatcctttagcggaattactggatcatgtttccatcagtaaatggaattggaatgcggaaagtacggatttattattgaaagccgagggagttgtttccaataatggaacaaaaggtaatccgtgtttgtcgggtgatattttaggagattggcgggaagaggtcatttggccttccgaagaccagacggaattacgtatttattctactaccataccggctgtggacagacgtgccacatggatgaatgaccgtcagtacaggttggcgatagcttggcagaatgtagcgtataaccaaccgccgcaccctagtttctagccttgtcgctactctgattaggatatatgtactattggttgaacgaataaacaggaaaatgaatgaatttctattctccggtttgttcgttcatcttatttttgtgagaaatttgaaatgcaataaaagaaaaacactataaatgtcatgaaaggaaacaaactttgtttatgctttttgttagctgccggagtaggattgggagcacatgctcaaaataaaatagctgctccgatgaaggatgtgaatcaagtcgttgataatacacttgatagtttgaatgtggcgcgttccgcccgtcctgtttcaggttccagccggaaaggggataatccggtgttgttccttgttggaaattcaacgatgcgtaccggtacgttgggcaatggaaataacggtcaatggggatggggatattttgaacacgagtattttgatgaaaataagataaccgttgaaaatcatgcattgggaggaaccagcagccgtactttttataaccggttatggcctgatgtcttgaaaggagttcgtaaaggtgactgggttatcatagaattgggacataatgacaatggtccgtacgatagtggccgtgcccgtgcctctattccgggaattggcaaagacagtctgaatgtgactattaaagagacaggagcaaaagagaccgtatatacgtatggggaatatatgcgtcgttttattcatgatgtgaagaaaaaaggcgctcatcctattttgatgtccctgactcctcgcaacgcttgggaagatgcagacagcactattattacccgggtaaatcagacatttggattatgggcgaagcaggtagctaaaaaagcgagagttccttttatagatctgaatgatatctcggcgcgcaaatttgagaaattcggcaaagaaaaagtaaagtatatgttctatctggaccgcattcacaccagtgcttttggcgcacgtgtcaatgcagaatcagcagccgaaggaatccgtaattataaagggttggaactggcgcgttatttgaaaccggtagaaaaagatacggttacgggggctacccgtaaaaaggggaatcctgtattgtttacggtgggagacagtactgtgaaaaatgccgataaagatgaaaagggtatgtggggatggggaagtgtgattcacgaactgtttgacacggaaaggatctctgtagagaatcatgcgaaagcgggccgcagtgcgcgtacttatttagatgaagggcgttgggataaaatctatcatgcacttcagccgggagattttgttttgatacaattcggacataatgatgcaggtgacataaacacagggaaagcgcgtgcggaattacccggttcaggaaatgaaagcaaggtcttcaaaatggagaaaaccggcagctatcaagtggtttattctttcggctggtatttgcgtaagtttattatggatgtaaaagaaaagggagctgttcctattgtcctgagtcatacaccccgcaataagtttgataatggtgagatagagcgcaataccagttcttttggtaaatggacgcgtgaagcggcagaagcggccggggcttattttatagatttgaataaaatatcaggagacaagctccaggatatgggatacaatcaaggtttgcgtgtagtaggaacgtatttcaatcatgaccatacccatacctctttgaaaggtgcccgtatgaatgcccggagtattgctgacgggctgaaagctacggactgtccgttaaaagactttttaaagtaaatgaaaacaaaacaacatcgtatgaaaaatctgtttctgtttttatttctattagttgtctttacgtcaaaggcacaggataatagggtttccggtttaaattcccgtcagtttactaaatactggaaggttgaatcggaatcgcctgattataaagtgacgtttcagggagataccgctgagatagtatctcccaagggattgactctttggagaaaagagaaaatgagtggaaaagtgaccattgaatatgatgcatgtgtggtggtggagtcggatggagatcgtctgagtgatttgaactgcttctggatggcatcagaccctcaatatcccgataatttatggaagcgagaaaaatggcgtagcggtatattcctgaattgttattctttacagctttactatttgggatatggtggcaatcataactctactacacgtttccgtcgttatgatggggatgagtcgggtattacaaatcctaaagcccgtcctgctattctaaaggaatatacggatgccggacatttgctgaaaccgaatcattggtatcacatcaagattaccaacgagaacaatagggttagttattacatagacggtgagcgcttggtggacttcagggatgctgaaccgttacgggaaggctggtttggttttcgtaccaccttgtcgcgtactcgtattacaaatttcagttatgaatgctcatcgcaagaggcggctgctgttcctttgcaatggattggtgagactccccggcaggataaggccgtaagtttcggagtgccttttgataaaggggaagtttttccggaaaacaagttacggctatctgcagagagtggtgaggatattcctattgatacctggactttggcttattggacggatggttctgtaaagtggggaggaatagcaggagttattcctgccggaacagaaaaactgactctggaaaaggcggtaaagaaatctaaagcgaaatccaaactgccggatacagataaaaagaagtccgtttctgtggcagaaacatcacagggtattcatatctctaccggagtcatttcagcatatatacctcgtcaaggcgaatttttgatagatagtctgttatataaaggtgtgaaagtaggagaaaaggctaggcttatctgccatacgcaaagtgaaccggtacttgaaagtacttctcaagtttctttcactaattatataggagaactgaaatctgtaactgtagagcgtgccggttctgtgcgtgcgcttgttaaattggaaggggtacacaaaagtccgaatggtcgtgagtggttgccctttgtggtacggctttatttttatggtggcagtgagcaagtgaaaatggtgcatagctttgtatatgacggagatcagaacaaagatttcattcgcgccttgggagttcgtttggatgttcctatgcgtgaggctttatacaatcgccatgtagctttctcttgtgccgatggtggagtctggagcgagcccgttcagcctttggtgggacgacgcatacttacattgggtaaaaccggaaatggagaatcttcgttacagcaacagcagatggaaggaaaacgcattcctccttatgaagcttttgacgaaaagaaccgtgctttgcttgatcattgggcttcttgggacagttatcgtctgtcccaactgacagcggatgcattttcaatccgtaaacgtgccaatgacaataatccttggataggtactttttccggtacacgtagtgagggttatgcctttgccggagatataaccggaggcatggggcttgagttgcatgatttctggcagtcttatccgtcttctattgaaatctcggatgcaaaaactccggtggctgctcttaccgcatggatatggagtccggatgctgagccgatggacttgcgccattatgataatgttgcccatgacttgaatgccagttacgaagatgtgcaagaaggaatgagcaccccttacgggattgcccgtacaacgactcttaccttgatacctcagggtggttatagcggaaagaaagcttttgcagaacaagctaaacaacttgccggaccgggagtgctgatgcctgtacctgactatttgcatgccaagcaggcatttggggtttggagccttcccgatcgtagtactcctttccgtgcccgggtggaagacaggctggatgcttatatcagcttctatcaaaaagtgatagaacaaaacaaatggtatggtttctggaattatggggatgtgatgcatgcatacgatcctgtccgccatacctggcgttatgacatcggaggttttgcttgggataacacggaactggcttctaatatgtggctatggtataatttcctgcgtaccggacgtgctgatatctggcgcatggcagaagccatgacccgtcatacggcggaagtggatgtgtatcatatcggtccgaatgcaggattgggtagccggcacaacgtcagtcattggggatgtggagccaaagaagcacggatcagtcaggctgcctggaatcgtttctactattatcttactacggacgaccgatgcggtgatttaatgaccgaagtaaaagatgccgatcagaaactgtacacgctggaccccatgcgtctggcgcaacctcgcagtcagtatccttgtacggcacctgcacgtctccgcatcggtcccgactggttggcatacgccggaaactggatgactgaatgggaacgtaccggcaatacggtttaccgtgacaaaattatagccgggatgaaaagtattgtggcactgcccaaccgtatctttacaggtccgttggctttaggttatgatccggctacagggattattaccagcgaatgtgatcccaagttagaaagtacaaatcatttgatgaccatcatgggaggttttgaagtcatgaatgaaatgatccgtatggttgattatcccgaatggaatgaggcatggcttgatcttgccgcccgttataagcagaaagcatgggagttaaggaaaaatcgtttccgtatatcccgtttgttgggatatgcagcctatcatacccgtaatgcaaaaatggcggaagaggcttggacagatttgttttcccgcttggaacatactccggctccacctttccgtatagaaacagttcttccgccggaagttcccgctcctttggatgaatgtacaagtatcagtaccaatgatgccgccctttggagtctggatgccatttatatgcaggaagtgattccggtggatgatatgagataggatattttcgtatctgtttgatgatatcattgtatagcttatcatcctgaacatgagtgaagaatctgtttacaacaactcttttattgtttacagattcttcactgatattcaaaataatagaaatgacagaatcattattcaacaatccatttttcaatattccgtgtttcagcactgaagttcactcctattttaaacagtcttcgtccgtctgtttcaaaaggaagtgcgtaatgcttgtcgttaatctgctgtaaggcttcttccgctgttccgttcagtttaaactccattatatagataaacttgtctgtctgcaaaacgaggtctatgcggcccctgctggtgtgatactccactttgacatagaaacctaccagcttaaagatgatgaaaagtacattctcgtaatgcagttcctgttcacggataatctcgtatgtagtgtctgcaaagaagctttgcaggggttggaagaaagaattgtagtcgccggaacgtatttcacggacaaacttttgtatctcaaatggagattcaacgttgttcatgctggtataataaggtacaagaaactgtatgaacccttcttccacttctttgtttggaaagcccaaatgatagataccgaactcttcatcatatccttttatagtaagatatccactttgatagataacaggaatgggactggttgactccgaatcaatgctgttcaacacttgggcattggtctcttcgtgtgccatccgttccagattgtaatgatgtctttttagcagttccaccaagtaagtaggagtccccgtctcgaaccagtaactgccaaattccttgcgcttgaaagcattgagcagactgaacggattatacatgccgatggagttgtgggtgaagtgatagccatcataatattgtcttagtttttcgcagaagctgtcataggtcatcttctgtacatctgcaaattcatgaagttcggtttccaaattcttatgaatttctttttcgctgatgccacataattctatatattcattccacatcgaaatatcatccaggttattcagatcactgaatacacttacttttccaaacttagttactcctgtcagcatggcgaatttgatgcagccatccttgcttttcaatgctccgtagaatgctttaagtgtttcgcgaaaactattttgcaattctttattgccgatggcttgcaacatgggcttgtcatattcgtctaccagaatcactacacgttggcctgtttgttcataagcgcgctgaatggtgccttcaaaacgcatggacaaggaatcttcggcaggctcgcttccatatagcttttcccaggttaccaatgtacggttcagtttgctttccaaactttgcggactatcatatttctgtgtattcaggtcaatgtgcagtatgggatattttgtccagtccttttccagtttttccatagccagtccttgaaaaagttcctttttcccttggaaataagcttccagagtggagataagcaggctttttccgaagcggcgtgggcggctcaggaaataatagcgtccggatttcaccaattgataaatcaatgctgttttatcaatatagaaatagccatccaggcggagactttcaaaattctgtataccgataggataaatcttattgcccatacttttttgtttttaaatgataacatacaaagttactgatttcctttttatttcctgtattttcagcgaattcttttggaataatgttttgtttttaagtaggtatgtcacagaggggaatacagaaacttttcatcttttgttctctcctaaaaggattttatgatcttttgtttcttaatttatgtcgatggttgatgtggataaagtataatttatgagataccttattagaaataatcagtaacaggcaaaaatgggttcatctgaagaaatttattggaacatggcaaaaaataatagaaagttggacgcgaaaatgccctcatgccctcatttttgctataacttatttataatgaactgcttattagtggtggtagcatcggtgttagtgagggcaatgccctcactaacaccgatgcttaaaaataaattattcagactttatcgcatgatacaaagtacttttattgctggcttttgggggaatgctcagcttgcagagaatgcgtctggaataatttatattgttgatttatagttctttttatgcgtatgtcctttcgggtaattgaaaatcttcatgagcggtctcccttcttccttcttctctgaagtagcagaagaaaagtgatatttgaaaaactgctccaaaggcaaaatttgctcaaattcggtgttgttttgccacaataccctactctttttcatcattcaccccctaacgttcgttcttataaagcagctgcatggcttgtgaatcgagttggtggtagtctatgtgtgcatatttccctgtctcttatttcttttctttcttttcttttcctactttttatatgtttgtaattgcttatctacctaggtggttaagtctaaccacaagagtggttaaagttaaccacaaaggtgactagacttaatcacatccgtggttatggcggatgcattatattttttactatattattccttgttatttatttgttatattgttgattattaatgcgttattatttgattatgtcgattgtttttcttgtctttataagatatattaaaacataaactaacatgaaaattggtataattgacctttgtaaacaaatagaagatcctaggatgaaccgcaaaaaagtccataaaatggaaactattatctatatatccattgctgctgtaatctgtggcgcccaatcctggaatgagattgaggaatttggcaatgcgaaaattgcttttttcaagagtcgcatacctagcctggagttcatccccagtcatgatacttttaacagattcttcagtatgataaagcccgattattttgagttgatcttccgtaattgggtaaaacaggtctgtcaggaggtgaaaggcgttgtagctatagatggcaagctcatgcgtggtccaagccaatgtgatggagaacatactaggggaaaaaaaggattcaaattatggatggtttccgcctggtctgccgctaatggaatttctttaggtcaggtgaaagtagatgacaaaagcagtgagattacagctattccattgttgattaactctttggaactaagtggttgtattgttacaattgacgcgatgggatgccagaaagatataacccagaccattattgggcatgatgcaaattatattatcgctataaaggagaataagaaaaaaaattatcaaccggctaaacaaatcattgatgattatcaggatagagatgaaataatcaatagagtcatcaggcatgtgtcggaaaaatgccggacatggaaggattgagaaaagaaactgtactgtagtcagttatggatctataatggagaaaatgttcaagaagaaacttgtggggttgaagtctgttgtaaggataaagtcggaaagaacaatagtcgcaataggggaatatactcaagaggtcagatactatgtaacttcacttgataatacccgacctgagaagattgcatctgccatcaggcagcattggtctattgggaataatcttcattggcaactggatgttacctttcgagaagactacagtaaaaaggtgaaaaatgctgccggaaacttttcggtggcaacaaagatggcgcttaccatacttaagaatgagaaaacaacaaaaggaagtatgaatctgaaaagactaaaagcgggatgggatgaaaactatttgtcacaacttttgcaggacaataatttttaatgcgtcggccctgtagtttggttgagcaatcatgaaggaattttgatgtaaacctgttcctatccttgcgtaactacatccctatgtttgtatcgtataatcgggagatatgctttgtgctatcggtataaatccgtaaaggctgcattgggcatgacatggaagagaaaaagcctgaaaaacggctgtctcttgaatttcgggaaatagataaatattaatgtatgtatctgatagtaagtaatatacgtctgtgtgagaaagtaaacactgtgagggcatgagggcatttatgagagcataaagatgatacactcataatatagtgcattgttaatgagatgattatcatcgttaatgagggcatgagagcatattgtcttccaactttttttgtaaacttgctgaaggaataagaaatatgtttctttgaaatctatatagttagaaaaattgccgtattcttaggttatagatgtctttagacggatagggtaatattttatcgcacctattttgtatttttgtaaaaaggagcgttttgtatggagaacataatcagaaagataagaacttaccatcctgtttcggggtaaagcgttgggaacattgacacaacttttggagaggcatatattcccggcagaaacacttcttatcatcatatcagttatgaagtgatagggtacaaggatataataggatgtacgggttcctattaaggggcaaaaaagaatagaagtaagggtaagtagtcttttaattctttccgtaattgttttagtgcctgttgaattctgtaatctaccgttttggaagatatattctgtgatttcattgaatgaaaatagtaatttaaaacagaatcccagatacgaaaattgatacttaatgtggggaagagaaaattcttatatgctcttccctatatttttataaatttattgtaagtgtaaaaagcaccgtaaatacgataaataatacaggctttatggacgaatttccatattattgtatcttattctatggaatccaatcctatttcgtcttatttttgcaatattgacaataaattcaatctctcaaaaatagtttatataatgatttgaaaatcagattgttgaaaatttcacgattttaattaaggaacaaacaagaaacaaaatcgttaattaaaggtatttcccaattttttgttttcactctgtttctttctttgcacttgcttataatcgggacttcttgaacagcttcccaccagatttttttcgtccgatggttgcatgtgagcttccaagaaccactgcagccaaaagaaaaaagcaagtattctttagttcatacaaagataaggaaaaacttataggcaggcaaatttggctgcctaaatatagtttactttgatttagcatatatataggctaatggactaaactaaaccttttcccgaacttcgtaaaacactccggtcccattgtacagccaaaagaaaaaaacattccacgtcatatttttcttttcgctgcaaccccctttttataaaccatcaaccttttacacgagatcttctcttccctgtgttcgcacatccgctttcgggctgcctgatatgaattgtgtcgcaaaggtacttgtcatgtctttcttgtatgcaaggtcaaagcctaacggttcacgacaaaatctccaccctccgttccgcacgggtagtatttaatcgtgaaaccttgcataaagagccatgacaccttttgaagcgacataattaaatcaagcccgaaagtagctggatgctacaagagggaaaaaagaaaacttaaaattcaaagttatggcaaactacgcaacaaacattttccacgcaagtacggaaaacaaacaagacctcaataagatagaggcatttctggacgataatttcaacggctttgtcaaccggtatggcgacacggtagatgccgaatttgattcccgctgggaatacccggaaaaagcaatcaacgaattaatagccttattggcagccaaagacaaaatctatatccgcatactgacatacgagttagaggacgaatacgtgagctttcggatattctcgcaaggtaaatggaacattaagttatcctaaacctaaacacaattcactatgtacgaatacgaagaagatagcgatattatcggtttgtcctgcacgttgctcaatccatataaaggttacatggaaggcacaatcgtgggcgactatggcaataccatagttgtccgccttgaaagcggcaaggaaatttcagaataccgtgatgaagtgattatccatgattaaacgatagcaaacgtatgacacagatagcaacaaaattcgtcaaatgggacattcccgaactggcgacattgcaggacagcaaggtttacaaattgcgggtacacctgaacaacggaggcaagttaaaccgggaagaaaagaactggattacccgtaacgtatgggaaagtatctatttcaaacgtggaattgccttgagcggttatcactttgacttttccgacatcctcaaacggtatttcgtcaaacagcacggaagtattcacgagtattatgcgattgacaaaacagcgttacgctcgatactgtacggcagaatagaggatattgtagaagtaagcggttaaaacaacaaggatatgggagaatacaaattttatcaagaccgtaaggttacaagttgggaacgggattatttcagtgtgaaagcggacagttatgaagaagccgaggcaatcgtccgctcatggaactgtgaggacgtgtcgaacatcattgacaaccgtctttgctatgaagagtggcaagcattgaccgatacatcggaatctatgctccccgaagaaaacgacggcaacccgacaatagaaattttcaatcaagacggagaatcaataatgactaatgtacccgaaacacctcaatcaaaccaatagaaccatgaacgtaacaatcgaacacgtcttttgccgctatagcgatgaagcggaagaaatctatttccgaatcatgaacacgattctttttgcaactgacgaaaccgaacttcgggcaagtatggaacgcttgaagaacgaaaccacgctcgacgactatttcatattcggatacggagcacaccatatctggataaagcaacggcgaccgagcgataaaaacaggattttcaaacatcggattatggtagcccatttctgacaggaacaggcaaaagacctccaatgcgctttgcgggctgaaccggaactaccagcttcagcccgttcctctttctcgcaatagacatgctggcacaatcccccttttatcctcacgatcaatttttatactgccccggaatacccgtttatatttctcttttcgctgcaaaccctttttatcgcccatcaaccttttacacgagaccttctcttccctgtgttcgcacatcgctttcgggctgcctgatataaattgtgtcgcaaaggtacttgtcatgccgttcttgtatgcaaggtcaaagcctgacggttcacgacaaaatctccaccctccgcttcgcacgggtagtatttaatcgtgaaaccttgcataaagagctatgacacctttcgaggcgacataattaaatcaggcccgaaagtagcaggtgctacaagagggaaaaagaaaactcaaaattttataggttatgacaaacgatgtaacaaattcaaatggaagagtaacggtagacgaagtaatacacagggattcggttttcagataccaactgttagaccgcttacggtcagactgcgagtattacctcaattacggtaacagacaccccaaaaccttatgggctggcgacgaaaaattgcaaattgagtttatgataaaactgcatgatagcttcaaggagggagaaaaaccggagtggcttacgatggataaaattttggaatacagtaagagaatgatagctcaagaagaataaaattactactaaggaacagactaaaaatgtgatattatggcatggttggcagtaaataaagacggaacagaatggattatgcccgaaaagcccgttcggggccggtgtgggcattgggagtatttggaagaagtgtacaatgtaccaatcgagatagaactccccaaagggactgtttacaaacttctcggcaaagaactgacatgggatgacgagccggtagaattacagaccaaaacagaaaaaaggtaaatgtagtacgggctggagtaccagtttcagcccggttacaccggctaaaatctaaaacagatacgcgggtgcgataccctcttttatttccgaacagacactcataccgtttccttcggaaatacccctttatacatttcggctgcgccatatccttttatatcgaacggccactcatgcaaaggcggcttctccgctttgtttcaaggcagacttcggccatttttcctttacctcttctttccctcatttctcttgccggatagagacagcgatatcgatacgtcgcacacgccttttgccggatcttcgtccgatagtattttccacgatgcagcgtatatggttgttaaacggtatatcgttcttgccgcttcaaccccaaacagccgatacactttctcgcctgatgttcttcccgcccacctgccggaacgggagcggtcttgtgtcggtggacggacaggtctttcatgtttccgagtccgctgcggattgtttcgcctcgactttttcgcgaccgctttctatttgaagtcgccatatcgtttttcgttgcaaagttagtatgcagacgggcgcgacccgatggtcttgaccaatggcgtatcgcacaaatcttcctttatcgggcctgcggtttggggcttcgcctccaaaataaagagtatttatgcgctatccttggtgcagccctttactgcacctacttttatgcaccgtaaaactgatttattaacttcaaaaagcaatcgcaatgaaaaagatcgagaacaatttcgcagtaaccggattcgtggcaaaagatgccgaagtccgtcagttcaccaccacaagtgtcgcacgtttcccgctggcagtggcccgtcaggagaagaacggcgaagataccaagcgtatatccgctttcatgaacattgaagcgtggcgcaagaacgagaataccgggtcgttcgaccagctcaccaagggcacgctgcttaccgtggagggctattttaaacccgaagaatggaccgacaaagacggcgtgctgcacaaccgcatcgtgacggttgcagtcaaattttatccggctgtcgataaagaggaggaagttcctgcggaaccggcaaagaaaccgaagaagggcaagaagtaattcctgcctttttgagacaaagcggcccgaaggccgcttttgttttgctcgttaccgttccggaacgtctatacttttatactccttcatactccacacgaagagtccgccgtcgtccattgattttcccgtgcaaagttaaggcggtcgggaaccggcaaggcgcggcttcatttgaggttaacaaccatcaactcgcaagctcgtcaatacttgttcaacacaaatgaaatcgtccataggactatccgcttcctccttgccttgtttcccttctgtccgccttgtggtccgcacgtaaaatcaaatcccgccggacgagggaaaccctccgaaggcagggataaaaaaacaaaagtcaaacttaaaattcaagacgtatgaaacagatgatttggtcaagctatgacctgttggacgaaacggcaaaagaatactatcaaaattcacaacgggaaatattggacgatgactgttacgaggtcagcgatgaagaatgggcagaagaagtatatcgctggctggacgacgaacggagcaatctgaataaagaagtggacggcattattgtcgtgttcggcaacttgggattatggaacggccggagacaaggctatcaaatattgggcagcaccattgccgatattttgaaatcccagtgcgacgatgcagaatggtacggcgacggctataacattcgcggacggatgggccatcatgacggtacgaactacaccttgtatcgtatcgccaaagaccgtgatgaagcggagcgtatcgccgataagatttacaaccgtgaaatcgacgaagaaggtttccgccggagaacacgttccctctatccgtatgtagccgccgtgtacggctggaaaacaaggcagcgcaagccggacaaggccgcataaaatgctgtccacaaaataccgcaacgcatccgccagagatggttgcggtatcctttatcgaatgggcgaaacacagaaccgtctccttttataatcagctccattcctttttatcactactcacggagcaatatccgccttttataccgaccccggtctttcgtatatctcccgtcttttcttctttccatcaccggtttggttttaccagatgcaaaggtaggccgtcgcacttgatccggtggcttgaagtgcatttcttgcaaaattcttccttaccggggtaagagtaattttccaaggaaagccaccgtatgaagttttcccgacagccgtgtaccgcatccgtaaaaccccaaagcggttcaggaagaaagaaccgacaaaagggaaaataagtattaacaatttcaaaaaactaagattatgcctaatcatgtgacaaaccgtttagaaataaacgcagaccgggaaacagtacaaaaagtaatgaatttcttaaaaggtaaaaccgatgatgacaatacgccttgttacatcgacttcaacaacatcattcctatgcctgaagaactgttgatagaaaaaagcagcagtggagatttgggtatgaaataccttgaagcaatgcagttgaagccattctattttttattggacgatgatgctttgagaaccattcaatggatagaaggattggcggaaaaggacagaaaagaagcgctgcaacttggagcatcgtatttggaaaatcggaaaaagtacggttatcccacttggtacgagtggtctaccgccacatggggtacaaaatggaatgcctatcaccaagactttgaagagccgaacatactttggttcgatacggcatggaatggagtgccactgcttatccaaaaactttccgagatatttccggatgtggaattccattacgcctatgcggacgaagacttaggtttcaatacgggaagaggaacagcccgcaatggagaaatcaacatgacgatacccgaaggtagaagcaacgaagcctttgaaatcatgttttttgtgaaaccgggaatggacgaatattttgaactgacggacgaaggttacaaatgggtttcctaaacattcggtacagataatgaccggtgcaggttcgggatacattgacaatggatgtgtcctgaatccttttgccggaattccccctttatatcttcatggctctttcccttttatcgaaacgcggtccgttcccctttgtaccgtgactatccagccggaaagtaatccttttataacattttagcttcccccgttttatcctccttacagccgtttcccaacactccatgccgaaagcccgcttattttttctgcaaagttcgattgccgcttgtctgtcctgtcaagaaccgcttacgcttgctgtcgaaaaatcttcctccccgactttgttggagagtgtatttttcgcagccttcttgcctggaccgaccgtcaatcctataggcagaaaaataatcaacctttcggtacaggattgtaccaaagggaaaaacaaaaaatagttcaaacttaaaatttagagcgtatgacatttaaagaatttatgcaagagaacggttatgagttacaaacaaccttttgggaagacttctcaatagcggacagatttgggttggcggctgttttggacactttcaaccgggctttcagggagtggaaaggggactataagttcttgacggaactgacattggtacttaaccataagatatggcaatactatgaaaacagaccggatatggcggtactttacaatactctttgggaacaagccgaccaatacgccaaagagaatctgaaagggaacgagttaagctattactgggaggtgacggattaaatatataataccctcgcatgatataaagaaaaagaggcagttctaaaagcctcttttctttataggttaacttctaattcttttccaccagataaacaaaaatacgcattctggagctggtgtaagtattctatgcggtgtccgcttaccgtatattcattagcatgagtggtaatgtaatatacagtttgatcatcccagtcttgtgtaatctccatttcatcattgtcaaatgtataatcgtcaagctgattaaaaccgcattgcaaaaccaatttttcagtaagtaatattggctgaatgtctccatttgttttatacggaggttctccccatttataaacaacggatatattctcttttctcaacttaggatcataatccaatgcacaaaccaaagatggtttacctttataagcaacgtaattgccaactctcaattctttaatcataacaattctgtattatcttttagactaaaaacttaatccctcttaaatcgctaatagatacaaatctacaaaataaaatgaaacttttacacgtcctttattttccctcttttacggcactcaggaatacttttgccggtttgaaggcggggatggaatgagctggaatcacaatagttgtgttctttgatatgttacgggccaccttctctgccctttgcttgataatgaagctaccgaaaccccgcaggaacacttcgttcccggcaatcatcgcatcttttacattctccatgaatgcctcgaccacggtcattacgacctctttctctattccggtctgctgtgcaatccggctaacaatttctgcttttgtcatatataagaattaaatagcaatgtacaaaaatgcaactttttttggataagtcaaatctttggcccacctttgcggcgaaataacgcaaaggacattttataatcctcatcggagggctatggaagccggataagatgactgggtaaaaccatcgtcttatccggcttccgtcgttttctgccggaagtaaaccatataatataaaatacaaagacgtatgaaagaaaaagtgattgattttgggaatgagagagtttccgttctgtttaagaaactgtttttccccactctgttgggaatgttgagtatgtcggcggtaacgactatcgacgggattttcgtgggacacggcgtgggcagcgacgggattgcagctgtaaatatctgcgtccctctactgatgtcactcatgggtgttggactgatgatgggggcaggttgttccgtaatcgcttccatttacttgtcgaaaggaaaaaccgttttggcacgtgcgaccatcacccaagccatgcttttcgtgacgctcatatccgtaaccgtcggaggattcattctggcgtttcccgaagaaaccgcccgtatgcttggctcgtcggagcatttgctgccgctggttgtcgattatctggtctggttttccccgtctctgctgttcgagttgtggattgccgtcgccttgtttgccatgcgcctggacggcgctccgaaactcgccatgtggtgcagcatcatagccgcagcggtgaatgtcgttctcgactggctgttcatcttcccgctgggctggggagtgatgggggcggcatttgctacctccctgagttgtttggccggggcaacggtgacgatgggttacttgttgttctatgcccgtgacactcgtttgcattctctccgtccgggtagaaaaaggattttattcttcttccatgatataggaatgcagtgcaagataggctcatccgccttgttaggcgaattgacaatggcgatattgctgttcatcggcaaccaggtattcatgcgccatttgggagatgacggagtaggtgctttcggagtaagctgttattatctcccgttcgtcttcatgataggtaacgccattgcccaatctgcccagcctattatcagttacaatttcggcacaggaagcacggaaagagttcgttccgccttacgcgtttccgtgtttgcggcattagtttgcggagtcatttctactgccgcctttatcctgtttcctgaattgcttgtcggactattcttgcgcattgacaatactgccgcacgcatagcgatagaaggattcccttattatggcacgggattcatcttctttattttgaatctctccattattggatattatcagagcatggaacggataaagccggccataacatttgcagtcttacgtggatttgtttttctggttccgtgcttcatggtattacctgccataatgggagtaaaaggaatttggctcgccttaccgttgtctgaaattctgacgactttagtgattgtcgttacattttggatatattcccggcaacgtgccataatttgcaggcaattttttcggatttaggttccatgtaaaatgccgctgttaaaaaagtttaaagattggtagcggcattctgagcagttatctggaataaaaattccgccaaatgcatgatgtattaataaacattaatggaacataaacgataattcgttatcaaaactgtacatttgtataacatattatatacatataacaataaatatattataatttatggataaatacatcattggcgagaacgctggtaaagtttggcgtttattgaatagtgaccatctccgtaaatgggaattttcagagataaagaaaattacagggatggatgatgccgagttgggtagtgctattggctggttggcccgtgaagataaggtacaattcgaacttgaacatcataacagtaaggacgaaaaggcatacttgtatcttatgttgaatgtatatatttgactccttcctataatgctgaaaaaagaaagaaaccatgctgatgaaaaacatgatttctttcttttcgtttggtatagaacacaatgacgggacacttccatcaatgagagaccgagttggagaagacattgatgacgaccactccggcaataatcaggaccagcccgatgatggcagccaggtcgaggtgctgtttgaaaacgaaaaagccgataagcgcgataagaatgatacccactcccgaccaaatggcgtaagctatgcctaccggaatgctcttcagtacgacactcaagcaatagaaagccgccgcgtaccccagaacggtcaatacggacggaacgagtttggtaaactgttcgctctgtttcaagaaagaagtggctacagtttcaaaaacgatagccaaaaacaagataaggtaagttttcatttatctacattcatcttttgatttatacgaatcatattccgactcctggcacgaaagaaccggcgagacaatgccgtcgttgtctcatacgtgttactggtcgcgccggtagtcgctcttgctaaaaccgccgaacaccgctttcagaagtttacccactacccagaacacaacgattatcaatattacttccatactacgtttttatttaatctgtattaataaattaaacatctgctgtttgttaccaagagtgcgaatccgtttcaacctcgttttccgacagttaaaccgtttataagcggtagttgccgccacccttttcgttttacgggttattcttccgccggactgtcgtcctttttctttttccgggttcccaaggggccgctgaatttccccctgttgagttttaccccatgcctgtggagcacgctgaacaccgaacttcggctgctgtacccgcttaccgccatgatgtcctcaaacgaatggccgttgacatacatgtcaacgatagtattttccttgtcggccttgtccatagccttcatcgttttcttcggaatcttcgctttctgttgcaggttcaagacacgtgcggacgaatatcgcagtatcgccacctcttcgggaagcgccccgaacatctccagcacatcggcaaccgtcgtttcgggaaacagtttaccccgtgagtcgatccggtcatggatggatatgatgcgtaccaccttgatacggcacaactcaatgaaggccgacagttcgcgcgaccctcggagggcattgctgaatttggccaccactacctcgtcgcccctttcgaggcccgccacaagctgtttccatttaggccgtagcgcctcgctttcgaccggttcctctatcacttgtacacagccgtactcctgcatccattctttgtcagcctcgaacccgtcgtaacgatccgccttaaatatgtaacctacttttgccatctaattgtacacttctatgataacaagtacaaatataacagttttattttaaactaaaccatactttgagtggaaaatcgaagaaagcacttggattttcccgttttcttcacttgttttcattgaaaatcaaactattaagtacaatgttaaaaatagcttataaaacaaatttcaacacttgccatcttgaaaataatacttagatttgcgctgtaaaattcaaaattgaacaatgaataatagaaaatcatacttaaaaatcatactttccattgctggactttctgccgcttcaattgccgttttcacattcccgtcatgcgacggtccgaacggcaaatcactggcggaaccccaagacacgcctgccggtctgtacagagagtacctctccgagatacgcaagtcccaagaactttcctttgaagagctgaccgtatgtatcggggaatggcaaaccttgaaagattccgtggctgcagccattcggcgggacacggcccgtcagacccattccggcacacgggaagaatgtcgtctgttacacgattccatttgctcggaactttcccggttgaccctgtcgaaaccgcgcacctacaaggaagtgttgagcctgaaagagcggttctctccctatgccggagacgtggaactgcaccgttccgccgaggagatccgtccgtttttcgcagcactggataaacggcctgcctaccgtggcaacaaggagcaaacgctgtcggcatatcgtaagttgcttgccggaaccctgaacgacggcatacacgacagtcgtgacctcaagagattcatcgagaaagaagacgccgtttttcgcgcttttctgtccggtctgcacgattccggcagtgcaaacatggccgacattacctgcgacacggagaagtgctgttccgaggtgtttctcgccgccggacgcaaagagattacctacaaggaggccctgatatacatggccctgcgtgccgaccgccgactgatacagaacgtgcgtacctgtctcgacgacatacatcggggcgaagtcgcaacacccgaacaggcacacgcctacatttggatgatactccagccctacgcttccttggacggcctctgtatgacgcttctctctccggaggataagaaagccctcgaccggattgcgaccgagacacccggcgctttcgagacactgcgtaaaatcctgccgtcggaaagaaaccggttggacgagctgcccggtatgctcatggagatattcatcgcctctttgtaaaagcctgttcacaaaataaacgatatatgattatgttacgacactttttggatgactttatgtcgttcgtacccctgcaaatgccgcagcttctcaatgtggcgacaatggaggaaccgcagttttacggcgactacgttctgctcacgttcccgttgcgggacccctatgatttggaggaggtcatggacatattcgaggacgacatggagctgatcacgctctaccaccatgtgccggtcggattggaaaaatccggtcatagcacctgtgcctactccaatcccgctttcggacaaatgttcaagatgaacgcccggacagacgcagacggtaaggtaaaccgcgtcatcgcgaccgtttacgattcgttggaactgatgtacggcgacctgtctctcgacttgaaactccacaccggaaacggcagcttcaagtacaagaaggagctggaagacgtgctgttggatttcatgtaaaacagttcctatgcgaaacacgatatatcgccagatgattttctgcatcgacacataccgcacatggatagaggtggccgatgacaacctctacaaggagcacgtcattccgaggaacaaccggaccgatttcctggtttcccgcacgctggtactgcgtgcttgcaaaccgcatggcacatacgaccggggcatgacgtggacgattccggagcatgatctggacgcggcactggctacataccgcaagcagaacggcatattcaagtcccggatgaagaaaggcgcatcgtccctgacagctgaagacaccgagaacattatccgcttggccacccacgggattgtccgcttggaactcgtggtacggcccgttcacataccttcaaaaccctattacctgttatgacttggattatattacagtttgtgtttcttgcaatgcctgtcgtccttccggcactgttgtacaggagcagacgttacttcatggcaaaattctacgataaaatgatatggagcgaaaaggcccgcaggttgtacacccatgtgctgcttatcgtattgctcctcttccattatgtctatacgagcggacaccccggcgagttcggtgttgtgccatccaccattgtgtgtgccgcatgggcctctttccggcgggcggaccgatggatgcgctgtttgctcgaccggccgaaacgtttcgtctggtttgcgctcttggcattggtcatcggcttcgtgccgcatctgtacacgatgtccgtaaccatcgcctttattcttttggctgccctgttctacccgtcggcaagggtcatgtccgaaaggacagacatgcgcaaattcctcgaatggctggaatatcccggagcattagccgacagttatcatagtatcatcacgcaagactgccatgataatgcggataatggcagtccatacaatccgcacgatatgaatcatcaaaaacagaacgaaaatgagaaatagaaatgaagcacccgccaccatactggccaacacggaagtgttcgactatctgaaagaaaaagtcggcgagcggaaaacaagaacagaagcctactgcgacctgttggataaatcgctggcaggtttcgtctccccgtttttaaggaaacaagactacgacctcggtccctgccagtgccatgtgaccgtttccgaccttgcatccgagtggcattggcaccgcgccaccgtccgctcgtttctggacacgctcgaagcattcgggcagttggaacgtatccggctggcgaaaagcgtcatcattaccatgcacctgcgaatcggcacgcctgacatgccggacagtgggcagaaagaaacggactttgccacaagaatacaaggaatattgtacgattgggtgattggcaaagcaacttctttcgatgtcggcaaatcatgcggacaaatcatgcgtcagaccttggcggagataaccggacaggacagccgggcctatccggacaaccattccggcacgacatccgtgcataccctccgatcagaagaacaattgcgtgagaccgttttggagtgtatcgcccatgccgccctatggcgggttctgcgcaagtcgagattcgacgacggctcaccgctcgtgcagttcttccggtccgatctcggtggggaatgggcggcgttcatcgaagcctcgaaagagcttgcagagcttgttatcgacggaaagccggatggaacggatttcggtatggacgaagagacggaacgcctcgaatcgcttcgtaaaccctttctatcgcttttagcgaaggcgcaggaagaaagttgaacagggattcgcagacaaagattgtataaccacgggtaatttgccccggttccggtccaaatatccttccagttatagcaggcatccgggcttgcccgtctgccactgaacaaagggaagggggagcctaataccccgaccgacattcgtcggtgggaagggtgtccgtacaagcagcaagctgggacacgggggattgtccgaaataacacggaagcagtatggcaaatgcaaaacaggttcttgacgttcaagtgtcgaaaggaatcaccgccgcccaaggcaacgaacatctgcgcaatcgcagcaaagaggcagagaagtacgccatgagtaagggcaactacgatcccactcgcaaacatctgaacttcgagattgcgtccggaggcaagatacgccctattgacacgagccgtaatatcccggaacggatggcggacatattgggccgtcgcggaataaaggaccccaacgagggactgatcgaaccgaaataccgcacggtggtaaacatcatctttggaggttcgcgggagcggatgcacgaactcgcattcggtacgcagaaggtggattttgaaaaaggtgcggacaataccagcatcaaaaggaagagcgacatcgaacgttgggcaaaggatgtctattcattcgtttgtggcagatacggagagcagaatgttgccgccttcattgtacacctcgacgagttgaatccgcacgtgcattgcacgcttctgccaatcaaagacgggaagtttgcgtacaaggagatattcgccggaaaggacaagttcgaatatagtgcgagaatgaaacagctccatacggactttttcgccgaggtcaacacgaaatggggaatggcgagaggccggagcgtcgccgagaccggcgcacggcacaggacgacggaagaataccgccgtatgctctcggaagagtgtacaactatcgaggagaatattgaccgccaccaaaaagtgctttccgatcttcattcggatatacggctggcagagcgcagggtaaagggtctcacttcaatggtggaaaacctgcgacgagagaaatccgaaaaggaggcccaactggcagcactcgaaaatgacatgaactcccgaaaagacgatgccttggccatatccgccgagaaagagaaactcgaaaaagaactggtcgctatccaagggaaactggcagacaaacaggagaagttacagactgccgaccgacagctttccgacctcaaagagaatatggatgccattcaggaacgcacggaacagcttaaggaagaagcctacgaatacacccgtgatgtacattccaaagtggacagcctgctcaaggatgccatgctggaaaacatggtcgatgagtggcgggaactgtcggcacgtatgaagccctccgaacggcaactgttcgatggcaccctcgtgcgctccgtggcagaacaaggcacggaagtcatgcactgcgccacactgttgttcctcggcatggtcgatgatgccactacatttgccgaaacacgtggcggaggtggtggcggcagtgacctcaaatggggacgcgatgacgacgaggacaaccgggcatgggcgctccgctgcatgagaatggcgagccgcatgatgcgtccggccatcggcaaaaagcccaaacgataaatggcaaagattgcctgaaaactgaatagattacaattaaaaaattggaattatgacaaagaatatcatctttatctttgcggcgttctgtacgctgcaagcccgtgcggatgtacaacccacggagaaggatactgtacgctgcatgttccgttacgatgacactgaactgctgcagccgttacagccctcatatcttgacggagtggtcgtcccggcacggggaaacggcaactggttcgtcagtatcgccggaggcacgacggcctttctcggcaccccgcttggctgcgaagacctgttcgggaggttgaaaccctcgtatagccttgccattggcaagtggttcaccccgtgggtaggcgcacgcataaattatagcggcttgcagttcaaggacggtacgctggccgtgcaggaataccaccacctccatgcggatctgctatggaatgtgctcggcggcagttattcccgtcaggaacaggtacgctggcatctggctccctttgccggtatcgggctgctgcatcatgcgaccaacgggcataacccgtttgcagtctcttatggtatacaggggcagtaccggatttccaaaagggtaagcgccctcgtggaactctccggcgcaaccactttccaagatttcgacgggtatggtaaggagaaccgttttggtgaccacatgttatcgcttaccgccggattttcttttcatatcggcagggtcggttggaaacgcgccatagacccaagtccttatatccgccgcgatcagtggcttgtcgagcgcgtaaatgctttgtcggaagagaaccgtctttatgcagggcagcatgacagagaccgacgggcactcgctgagctgaaaaagattctggaaatcgaaggattgctcgacaagtacagccatctttttgatgacgacgatgcattcgacggcaaccgttatcccaaaaacaattacagcggtctgaactcgcttcaagcgagacttaagaaccggaagtgggacgggaaatctcccttggatgggaagggtacacaatctgccgacacaattcccctttgtgcgggtcaagacacactctgtatgcaatatttggctcgtatgcagaacggaaaagagtgtatcggctcacccgtgtatttcttcttccaactcaatacggcgcgtctcacggatacctcccagacgcttaatctcgacgagttggcaagagtagcgaagaagtacgggttatcggtaagcgtcattggtgcagctgacagtatgaccggaacagcatccgtaaacaatgtcttgagtgcatcaagagccgattatatcgctgaagaattaatcaaacgtggggtgtcgggcgacaagataaccaaaactcaccaaggcggcatttccgattatgcgcccaatgaggccaaccgccatacaaaggttgtgctgcatctcaaataatactttttgttcatacgatataaaaacattttttttcgtttatggagagcctgtctgtgaagatcggctctctttttaaacggaaatctgactgtttgatattttctaatcggtaacgaacatcgtaattatttattatatactatctttgcattcagtcttttaccggtataattcatgaacatgcaaaactcttatttgacctcgaagccgcactacgagattctggacggactgcgcggcgtggcggctgctatggtagtggcctttcatctgctggaagcgcactccggcggcaaccatctgaaccagattatcaatcatggctatctggcagtagatttcttcttcatgctttcgggcttcgtcatcggctacgcatacgatgaccgttggaaccggatgagcacgggaaccttcttcaagcgtcgtcttatccggctacagcctatggtggtcatggggagtatcgtgggagccgcgctcttttggtttcaggatgccccctgttatccggcaatggagggcgtgtccgccggtgcggtgctgctggtcatgctgctgggttgtacgttgctgcctctgccgctgaagtgggacgtccggggatggatggaaatgcacccgctgaacgggccggcatggtcgctttactacgaatacatcggcaacatattgtacgccttgttcatccgcaagttcagcaagacggcattgactgtcctcgtggcgatagcggcgtgcttcacggtacaccgctgccttaccgcacctgccggcgacatcgtgggcggatgggctttgaactgggaacagcagtacgtgggactggtccggctgatgtaccccttcttcggcggactgctcctgtcccggcttggctggctgatacgcacccgcaagaatgcttttgggtggtgcagcctgatgataatcgccgtgctttccgcgccccgtatcggtggggaggacgggtattggatgaacgggctttacgaggctttctgcatcatctgcattttcccggttatcgtctcgatgggagcgggaggcaggataacgggcaaacgctccgctgccgtatgcaagtttctgggcgacatatcctatcccgtctatatcacccactatccgctggtctatatttatacggcatgggcgttcaaccgtcaggcgacacttgccgaaggccttccttacatgctgctcacgttcgtcggggcgttcgcgcttgcctatgcctgcctgaagtgctatgatctcccggtgcgcaaatggctcacggaacgtttcttgaagaagaaataaaaagcggtaaagaaatcctatatttattatcgtatttctgtcggatgacagataaagttccgacgccgaaggtgttttgcggacgacacaatcagataacgcgaacccaaatgtctattactgtttcgctgatagaagaaaagccccttgatgcctttgccataggtttgaggggcttttggggaggctacaaacctctttttgttgaataggttcttttgatattgtcacacctttttctatcccgaccgacgtataaaacgtgcgtgtgcatgtcggttgtacaggccaaagacataccgggagaataaaaacagcactgcccgcctgtagaggggtttcctacagacgggcagtgagtaagacacggaattaaagtttggcggttgtcactggatagttacgccactgggcggtacgtaggctgcacggatgcggagaggtctattgatgcggggtgctttaccggtagtgccgttatcattcgtgtatatatcgtcccaatcactttctgcataaccaccgtctggcagggccttggtggcacgggcatagctggtgctctctggatagatatacgcaggccatattcctgttctatcttttgctgccgccgatgaccagtagaaattgttctggaactccgtgtatgtattgtaataagaggtaagaatactttccagttgggagataccgggcaggaaccaaccggaagaattgctcatgccctgtacggctccattggcattgcgcttgttcttgttatagcaatattccgccgctgagcggggtttttcgttcaggttcatttctgattgtccagcttgggtaataatgcgccgggtagctgccgccccatgtttgtttccttccgtccattcgttatttagcggacctccgatgtattcaccattacaaccccattccaaaccgtcatagatataatccccttcaaactcgttcagggggtcgtaatgggatatatattcctcataggcttccacgtagatagtgccttgaagtctgccttcataataccactgtaccggcaacagaccgtgctgtacgatttcaatggtacgggtacgtggcgtctgcgtgttgttgtcggtgtacgagatgttgacggtggcggtgcggtctttcgtgcttaggttttcgtccaagtagaaatagatgcggtcacggctcctgctgatggtgtattcggtgttttgggcaagggtgttggtcaccaagtccgtggtgaagtatttgcgtttgccgtttcccgcagtccatttctgtccggtcgccaaatgggtatctgtactcatgtcggcagagagtgttccattctccatattttcggctggcacacgttccatgcgtatccaagtgtgactttccgggtcggctatgctgactttcatctttggattctcatcttcctcgaagaggtacacgtccaaaggtgtgatacagaagtgggcgtcgtggtcacgctcgcgcagcatggacaggtagaacgggttgttctgctcggtgatgttgacgcgggcatcgaaggtgatgtggtccgggttgttgcccacatgggtcagtccgctgatgacgatgttgttggcgtagtgcctgttgcgtatcaccttgaagtcattcaccgggttgcctccgagatagaaggtatattcggcctcgatggtggtgttatcctgatttgcgggcagggaggggtcgccgttataggtagtgtagtaggctctcatcttgaaataggtagccttgctgttttcgcctacaagtctcggcttccaccgctgcttgtcaacatcgtcctctactccagccggatactgatagttttccggatcttcgtccggttcaatcatgttctcgaacatgtagaaggtcagggaggcggccccgccgtggttgtaaacgacggcatcgctctgtatgttttctacattgcggtatggctcatcggtagtcaggctggtctggccatcggcaggctcggtcaggggtacggcggtaggcatgttgtacacgccccattccgcaatggaaaggcggggcagttgtccgctctcgtccgagtggtcggaatcgatactgatgttgatgtcgatgcgggccatcagtgccttgagctgcatcgtgaggcttcccttctcggtgaggttcacggtcgcgctcttgcccgccatcggcattcccgtgctgggcagggtcgtgatgtcatcgcgggtgttaggagtataattggcaggatcgtacacgaacgcttcgagcagctccttgggctttttcccgtctttgctatattgggggaaattatcgggataaccgtcgccgttggcatcagttaccacctccggagtcacgttggccaaagcgtagatggtagttttttttgcgaatgccggatctttaaacacgtccgtaggaatgctgacattggtcgtattcgccgacggagccatatacggcgagaatactttcgtgttgctcgattccagatagtcgccgttttcgtcgaagaagaacaggtagagctggttgatgcgcttctccttgtcgtccttggcgatggccgagcgggtgacgacttgctgcggcagcatgttctggcagacggcctcgatggtgaatccgtcgccgggcggaacggtaccgccgccaaagtcctcctccgtggtgcaggctgccggcaagagcatggaggccaccggcaggaaataataaagtatctttttcatctttatgctgttttcggttgttgttttattggatagagacgtcgctgtcgcccccgtcttcccagaactcgttatcggcggcaataaagttcagcgcgaaggtttcgcccacgaagttgagctgcgccgtatagcggacacccgcacggggctggaactgtgtcggacgttcggctgtagcggtcttatccgcccctttgtaggtatattcgacggaaacctccacgtccttgccgaaataagtgccgtccgtggcgttgctcaacagaagcaggtgcttgtcgcctatcgggctgacggaactgttgggagctactgcaagccctgtctcgttgttatatatctcgtatgtgccgggataggtgccgctgtaggtgtagaatccctcttcgttggtattcttgctgaaatcgatggtaatcgagcgggtgaagtggcccgacaaggtaacacgcttgacggtaacagtttccttcttttcatctccgtaattgtagttgttcacggcgaagcccaagcccgtcatgatgtggctgaaattgaagcccacgttccccgtggtacgcaggtggttatagacgacggaaaccatcgcgtcgggtgtctgcatgtcgttcaacgtggtagtcgctacatcgcccgtctcgccgaacggcatggtgaacgtcagtttcggcacgccccgtgtggtggcgctggcgggactttccactgtaaaaccgtccttcgggtaataggcgaaaaaggtgtaccgatagctgtcgggggaggtcgccgccggattttccgtcgtgttgtaccattttcgcgggccgccactgttattatagtcataagtgcaggccgagccgttgtaggtgacggcttgattgaagaacacgtcggggaaggcgttgccgctcttgttaccccagttcgcgctgcccgatgcccagtccttttcggtgttactgccacgctgataaggcacgcagtagcccagtacgccgaacgtgccgccggtggggaatgcgtcgtggaacgtgctccgggtgagtttctccacggtaatggccggggcggcaaagtggatggcgtcgggactgtcggcttcgggctgcgcccattcctcctgctggcaggcggagcagagaagcaggagagccggaagtatgtatcgttgcttcatttggatgttcattttatcgtcaagttacagatagcttataattgggttattgggtcacgtcgatggttacgttcccgcctatggcgtcgctccatgcgttgaccgtgggcgagtcgaacacgatatagcctccgccggtgagggtgaacgagtaacggtaatggttcgccgcctcccacatgctcacggtggtggcaggcaaggtgtaggaagcggtctttcccctctcggcatcggtatcgtaggtgacagtcagtttcaccccgtccgtgagcgattgcggaatgagtagcaggtcgcccgacacgtccgcatttccggctggggttacggaagtctctttctccacgctgacggttccctctgccgtgttgctccacaggggttccttgccgctgtcgtaatctcccttgacatccagcccctcaagggagatggaatgtaccgtggcgttgccaccctcactgcgtgccgcaaaggtgatgcgtgccagcaaatgttggaatttgagggctaccggaccgggaggctctgtctggcctgccatgacggagatacccgtctttttcgccgtcatcaggtcgtgtcctttcgtggcgtcgaagcccttgacggtaaatgtgccgtccgtgcaggtggcggaggacacggcatcgcccagcgtttccacagacggataaagggcgtagaagtcgtaggtattaccggggagccagtatctcgtgccctcgtaaccccacatgccggaaacgtatgtcactttttcggcgttaaacacgctcgtggccgtaccgcccgttccgtcggtgtagttcccccatacgctgaacgagtttccatcggtcaacattccgtccgcgtcgtcgatggcggcccgtgtcacggcgggaccggcaaaacggatcgccccgctgttgccgcttgtttccatgtccgggcccgtgctttccgtacaggctcccagcaggcaggcgacagccggtatgaacaaggttttgaataggttgttattcataatcatacattgtttctttatatccggttatttctgacgctaccggtagcgtaaataaggagcaacactcccgttagtggctatgaggggacattcaacccctcatagcctgatgtgatgtcttttcggctattgatgcaagcgattactctccggcgttttccggggttacatcactatttgatgcgtcagcccattcatctacatcaataactttgaactcaattacctgctccttcaactccggatcaatcgtgctaccgttgatttctactgtatagttatatttgaaaccttcagtccattggttctgtactgtgccgctaacatcgcctttatatgccaattttcctttgaactgattttcacttaattgtttatttgctgcatcatagaaagttgcggtaaaggttacttccagattttcgttgctttgtggaatgacaaagcaggtcgtagtgtgggtagcgtccttaaagtcttcggcaatatcccctaatgttccgaaatcatagtcctctgttgaaacactttgagtagtccaattgatatctggtttcccgctttcggcataagtcgctgtaacattagttgtttttactgcattcaccttgatgtcggagattttcatggtgtagtcataagcgtccgtgttcttgaacgtgaacttcacctgcgacaacatatggtagaaagataagtttactggaccattattagcttcttttgcagtcacctcttggggtatagccacaatcaaatctttcgtattgtctaccgagtaatttgggaatgtcaacactcgagaggttgcattaaactctgcattctcaattttattaccaccattggagtaagcgccaaaacggtacttcttgccatttatccaataagcagtctgtgtgggattccaaaccgtcccctccgctcctacagtgcctccgtctacctgaacattggtatatacggaagtccatgaatcatcatagtttccgaatacgaagaacttctgaagattctgctccgttgtttcagtcacactacttctcgttgaatggttcacgaaagttccgaactggatcgcccggctctgcggcatatccacaacttcttcgttcgtacagcttgccagtgctgctacagccactccaagcacaaaaaaacttttcttcataagatgtaaaaaattaaattaaaaatttggttatttagtacctgttgttttattcgtttcagtcaatgggcagcggtatgtccacccattctccccagccgtccacatctacgtcaaagctgcctccgccttccagcccctcgtcgttggaaatcgacagcccgctcacgacgataacgccaccccgtggttgtcctttcacttggtctgtgacatcgaactcgaaggtcttgaacttgccgttcaccattctcacctccaagttcaggctgtaccttcgcccgtccgtaccgtttcgtccgtaatgttcacccggatagtcgggtacgccgaacgactgtaccagcgcttccgctccgtaatcttccagcgtacagtcgaacattaccgtggctgcggtttctccggtatgcccatcgttcagatagaccgtttcggccatgcctgccaaggctccgcgtgccaaggccacgtattgttgtccgctttcgaactcgtaacgtatcatataggtgtaaaccaatggacgcaaggtaaccggcagctccgtcggggcaagtgttttttctgccgtgtattcttccatgtatgccccgtaaagcatgtcgggctggttcacggtacgttcccccgcgtgcaattcatggaaagaactccgggtcacgccgcgtgtggtggctgtggcggattccgaagcggccacgccatcgaacacgatatattccgtatcattgttgtagaacaacagttcgtgcgtgccttccggcatggcgatccgtcctccttcatcgggcagattgctctctatacgctgtccgtcgctggtatagacttggacacgtattccgtcggccggagcaggacacaaatcttcatagtcgtacttccagtcctcttcccacaatttttcccagtcataggcgtaagtacgttcccattcctgttcccagtcggaagagagattcaccttcacggaaagaccatgctcgtcgtggtcgtaacacaggtctttccggcagctcgtggaaaggaatgtcaatcctgcaaacgtaagccccatgagggtatatcgtagcgttgctttcatcgtgcgcctcctttctttttatcggtatcccacaaccgccacacaagggcaaacttcagtttcaacggaccgaagtaattcattcggtttgtctgctggtacacgtagtgcccgtcgatgggaagatattcttcgtacttgctgtgcatgtaccccagaccgataccggcttccagcgagagccgccgtccgatggggaacatgtagccgtagctgacacccaccatttcggcctcgccctgatagccctctttgccgttttcaaggtcgtaccacgtgaagccgccgaacacgccgaggtagtggccgtgccacgggctgccttgcttctgtccgaaccaccagcgtccctccgggctgattgtagctacttggtaacatttgtgcttgccgtcattattccaccatgccatgtcgccttcgaggttcaccgtccaacggtcggcgatacggtactccacttcgagcgaaggcatcagtatcgcatcgtagagcaggttggtcttaacggccaaccgctgtactgtcggtctatgcggttgcacggtcgcttccttccgcaccgttgccggctcggaggccggttccgccacgctatcgggttgcagggccggttccggctctttcactttcgtctctttttgggaaatgacttttacgggcggttcgggtttccggtagcaggccaccgagaggctggagcgcagttcgggaaagaaattctccagcatgtaggtgtacggcataccgccccgcaggtccatgagctgtttcttgcgtccgtccactacgcgacctgccttgtcgaacacccatacgggcgtatggtcaaggatatgcagcacctcttccttgtataatatgtccgaggcggcgaccatctggcgcagcatgtcccacgcaataccttctccatgtatgcagatcaaactgtcggggattccggcgtggcgcacgagataggatttcagggagtcggccctgcgctctgacagcaccccgttgagacggttcacaccttcgggcgatgcccacgagcgtatcacgacgctttcaaggcggtccgcaccgtgttcttcacgcagggtgcggataaaacgctccagttccgcgcggttgtcccggaagagcacgtccacttccctgtggccctgccggtaatggatacgggccgagtccaactcttgcgcatgaacatacccgccgcagaataaaagaaataataacagtattcgtttcattgtcataattctgtctatgccaatttatttatatcagctatttattcaatctctgtacgtttgtccgtgccgtgcttctttctttagaggtaaaaaagcaccgaaccaacaaataatcagccggataactgtcagttatgccgatttatttgttcgttaaaaagactatcggaaaaaaggtcgtattattcggacactccgggaaaatttgtcctactcaaagaactgaaacgcaattttttgcagattttttttgtggataattcgtgtttttgtaattttgtggctgaaaacgaacgatttaaccaacgattaaaccaacgtaaaatcataccctccgtttttgcaactcccctttccgtcttatctctttctctttcatggccttatctatttccttatagcggctacggaatttcatgaatgtatcccgcgaaatgtcgaaacgcctgcatatatcggcaatcgtacagttccgcttcaacatgccaacgatgacctttcggttttcgatcagcacgttcattttcgtgtagctgccttttttccgaccaaggacgacaccctcggctttccggagggcgagagcctccttcgtgcgcatcgaaatcaggttgcgttcaatttccgctaccagaccgaacgcgaaacaaagtaccttgctgttgatggagttgtcgaacgaatacccctccttggttgtgtaaaggttgattcccttctccagacacttgcccatgatggccatgaggtccgtcagcgtgcggcttagccgcgaaacttccgtgacaatcagcgtgtcgccccgtttcatgcgccgtatcagtccccctaatttgcggtcgcaccccttcttcttgccgctggcgacctccgtcacccactggctgacggaaagatttctactgtcggcgaaacgccggatctcgtcttgttggttagccgggttctgtttgcccgtgctgacccttaaataacctattatcataatccttaattattttacgggagcgacattgcccccgtccggtataaataaggcatgatggttcgaaatgaaaggattctgtacataattgtatgcgtaacattttattcttcaactattttaatgtcttttcggaatctcgtcgggaaaaactggcacgtatgttttctccggacaggccgtaagctcgtgaaaaacataaaccgttacggaggaaatgcctcattcgtggaactgcatgaagtcggtgcctatgacaacagccattctctgatgccggatttgaaggggcaacgaatggaccggatgccccaaatggttggacgagcaatgctgaaatcgaatgatatgccgaaaaataaagaaaaatgcggtcttctcgacagtaagcaagaagccgcatttgtaataagtaccccgatttctgtaagaacgctttgtccggaagttgtccgttgaataggttgtgcttatttcaatgatttgcgtagcaacggaaggcgtttcagtatatggccgatagaaaggacagttgtaacgattcctgcccaaaaatgacattgcccgaccggggaacctgctccttctatgcctaacagggcaaatccggtcagaaccacggacaggaacaggaccgacagtaccgccgtgaccttgcttttccggcctattccgttcttggcagttcccttgtaccagccccaatgcgtcgctatatgaaatatggaggccatgaggaacagcaggctcgtcaggacatggaaaactgcccaattatgccatacctcgtgattgccttcatagtcggccacatgcaattcgattccggagtatgcggacaggacaaacacgggaatcaggctccagtctattataaaaatctttttcatctgtctttcggttttaatagatgcggcaaagttcgcatcttcgactggaaccggacgataacaaatgtaaagaaatgaactatcgcctgtttctgatcctcgacagggaaacagaagtaatccccaaataggaggcaatataatgctggggaatccgctgtatgatagaggggtgttctttcagcagttcttcataccgttgttggggggtgttctttatgcgggaaaggaagagccgctgataaacatggaagcgttcgatgattttttcctcgtatatctgccgtagcgcgggcttctgtccgaggtttctgaaaaaatcttcccgcttcataaccgacagttctgccggctctatgctttccagggaaaaaaggctcggtgtccgttgatacaggctgtcgaatgacgcgacgaaatccccttcgaaaaagaactggaaagtgatgtcccgtccttcgttgttgaaaaacaggcgcaggcaacctttccggatcaggtacattctgtcggctaccttgccttcttccaacaatatcgttttaggaggaacggataattcggttatctccggaagcgatagaaaataggcgtttttatcagagttcattgtcatttcatctttattcgtcatggtttgatagtgtattgttcatcacgtactcggcacaaattctgatagagactcatctactttaataacttgcgttcgctgccgccagttcccaatattctcatctgttgaatggctatctgattgagtttaatcaaccgctcaccctgcggaataccttggtctataaatactgcattgaggttttccatatttgagaggcaaataagctcattgattgtggcatagtcccggatattccctttcagttcggggtgttgctcacgccacatcttggcggtcataccgaacatcgccacattcagcatatcggcttcatcggcatagataatactggcttgtttggcggttacctctgccgggataaggttctgttttatggcatcggtatgtatgcggtagttgattttcgacagttcccgtttggctgaccaaccgagttgctgttgttcctcggtctttaatcgttggaactcctttataatatacagttcaaattcaacggaaatccagcttgcaaacttaaatgctatatccttgtgagcgtaagtgccgccgtagcgtcccgatttggagagtatgcctattgcgtttgtcgtacttatccattttgtcggtgataaggtaaaggcgttcagcccggcttcctttttaaacccctcgaattcgaggggtttaaaactcgggttgtacaaactctcccaaatacccagatattctattgtattccggttacgcagccagttcccgataaccgcagtcgggtcatcgcttttgtatcttgctatgtctgtcaggctgatataatcattctcgttgactgatataattgtgacacttgtgtcttttactgtaatctttgccattttatatttgattctttgggttttatgtacaaaagtaattataatctatgagactttctccttttcaatgaacaatatgacttttcctttcggatatagacaaggatatagacaaggtatttcgctacctccggtaatacctgcttttcccttatttcaatcatgtaaaatcaccataaataggtattgtccagtaaattcaaaccccgtacttttgcaaaaatataaacggaaacatcgttcattatttatgcaggtactcaaagaagacatacgcggccgcatattggcagtcgccgaacagcgattcgggcagcaggggtattccaagacctccatgcgcgagattgccggagccgtcggtgtcggtgtggggaacatatataattatttccggaacaaggacgaattgttctgtgaagtggtccgtcccgtcctgcacgctatggaagccatgttgcaggagcatcacggcatacgcggcgaggacgtgatgacgatgcgttccgaaaaatacctgaaagcctgtatcgacgaatacgtttcgctcatcgaaacgcatcgcagcctgctggagatcctgttgttccgtgcccaaggctcttcgctggaacattttcgcgaaagctacaccgaccgttcgaccgggctggtcaaggcatggttcgccgccatgaagaagaagtacccgaatataaatacggctgtgtccgattttatcattcacctgcatacggtgtggatgttcacgctgttcgaggagctgttgatgcacgcggtgcccaaacaggaaatggaatccattctgcatgactatattctgtttgaaattcaaggttggagggccattatcaaggtatgacagatagaaaagacacatacggacaagctgccgtaacggggcagcgggaaaagaggaaatcttcacaaaggtttcctctttttttattcgtgaacaaatctgaatatcgttcattaataaatatcataacaaatgaaacagagacataaattcgagagcattgtcgccgagacattgctcattccgctctattacagggcgaaagagagccgccgaaagaacccgattctgaacgacaaggttgcggaggggctggtggacagtctggaatacgactactcccgtttcgacggggcgaagttgagcgaggtcggctgcgtcgtgcgcgggtggtttttcgaccgtgccgtgcgccgcttcatagggaagcacgccgatgcggtggtggtgaatgtgggctgtggtctggacacccgtttccagcgtatcggcgacgggaaggccgtattctacgacatggacctgccggaagtcatcgcgctgcgccgcgagctgattccggagcagccgggcaacccctacattgcggcctccctgctggatgccggctggctggacgacctgcgtcgccggcatcccgatgcgcatttcatcttcgtggtcgaaggcgtgctgatgtatttctatgaaaagcaggtaaaaacatttctgcaccatgtggccgagcgtttcgggggcggcgaactgtggttcgacgtctgcggtacgatgatgagccgtcacggagtgaaacccgattcgctccgtgaacacgaggcgcaaatccgctccggtctgagcgacgggcgtctggtagaacaatgggaaccccgcctacgccttttggaacaggccaattacatgaagtttttccgtccgcgctggggcttcttcttcgggcaaatattgggacggatgacgcggctgtgctacaagttcagttcgatgttgggatatgaaatcgtatcgaattcccgtgacacggcggcaattctccatgaaagatgaaagagacgacgattgaaccttatctcccaatgttggaacggttcgaagaatttttcagggaagaactggcatcccgtttgtcggtcgaatccgttgattccgtgatggaagcggctgtcgagaattttcatcgtatctccgcaatcattccggatgtcccgccgacatcaccatgggtgaaaaacattatcggtatagcctatgagatcggtctgtggcaagaactgtcggccagaggatggagtccggcagaactttccattgttacgcagaaagcattgaaaaagctcacgttgtcgagtatcccttctgaaaaaatttcggaaatacgcgaaatgttgtgttcgcccgactatgtgcgtcgcatcgcttccgcttcgcatgtttccacagaggacgattggctgttcgattgcgtgttgccgaatgcggacgatacgttcgatgtcggtatggacattgcccggtgcccggtcgccgaactctgttcccgtattggcgtcgagtgctttttcccctatttctgcgtgaatgattatatcacacacgatgtactcggtatccggctgacacggacccgcacattggcacacggtgcttcgtgctgcgatttccggctgacaaaagagcggggagcggctgacggggctgttgtaatccggccggaagatttacaggaatttaccaacaacggatagagagaatcggataaaattcaatatatggaaacaaaagaaaagaagaaagaaggtctgtcccgcctgttcgagatcgcggggcagaagaaagggctgctttttctggcgggtctgctgtcggcaggcagcgccgtgtgtatgctcgtaccctattgggcggtgtacgaggtgttgaaagagctgctgacgcacggtacaagcccggcttcggtggacgaagccggcatgattcgttggggctggatcgccttctgcgggcttatcggcggactggtgctgctgtacgccgccctgatgtcctcgcacgtggctgcattccgcattctgtacggattgcgtgtccggctgtccgagcatatcggcaaactgtcgctgggttatctcaacaacacctctaccggagccatcaagaagacgatggagcagaacatcgagaaaatcgagggattcatcgcccacacgattcccgatttggtgaacgtagtggcgacggtcgtggtgatgctcgtcatctttttctcgctggatacatggctgacggcggtctgtctggccgtggtgctgttgagcttcgccctgcaattctccaatttcatggggaagaaggcacgggagttcatgagtatttactatgatgcgcaggaaaagatgagcgcctccgccgtgcagtacgtcaggggaatgcccgtggtgaagatattcggacagagcgtccgctcgttccggcagttcaacgccgagatacaggcttacaagacattcgccctgaaatgctgcgacacctaccagaacgggatgatcgcgttcaccgtcctgctgggttcgatggtgacgttcattcttcccgtgggtatcctgctgatacaagggaatccgcagtcgctcgcattggccgccgtatggctgtttttcatcatcatgggaccgggtgtggcttcgcccatctacaaactgacgttcctgggcggaaacaccaaggagatcgacgaaggcgtggcgcgtatcgaccgcattctggagaaaaagcccgttcccgaaccggaacaccccgaagtgccgcagtcgtatgaggtggagttccgccacgtgtcattctcctacgaaaatacggaacagggcacacgtaccgaggcgctgcgcgatgtttgcttcacggcgccgcaaggccggattacggcgctcgtggggccttcgggaagcggcaagtccaccgtcgcgaacctgattccccgtttctgggacgtggagcagggcgagattctcatcggtggcgtgaacatcaagaacatcgctacgacgcagttgatggataccgtttcattcgtctttcaggatacgttcctgttctacgacacgctgtacgagaacatcgccgtcggttcccccgccgcaacgaaagaaacggtcgtggcggcggccaaagccgcccagtgccacgagttcatcgagcggctgccgcaaggctacgagacgagaataggcgacgagggcgtgtatctgtcgggcggcgaggcgcagcgggtatgcgtggcccgcgccattctgaagaatgcgccgatactggtactggacgaagccacggccttcgccgatccggagaacgaatacaagatgcagcaggcccttcaatccctgataaaaggcaagaccgtgattattatcgcccaccggctgtcgtccatcgtctcggcggacaacatcgtggtcttgcagcagggacggatcgtacagcagggccagcacgacgacttatccgtcgccgaggggctctacaagaacatgtgggatgcctatacgagcgcttatcattggaagttgaacaaaaattgaatacggagatatgaaaaagaatagtttcttgaacgatattttacagaatacgagttgtccgcagggattctggggacggatgattttgcggggaatgaactgtttccacgcttcgctggcccatcgcggcatgaaacaggtggactggcggccggaatggaatgtgctggacatcggatgcgggggcggcgccaacgtgaagcgtctgctgaagctgtgtccgcagggaaaagtttacggcatggacctgtcggaggagagcgtcgccttcgcccgcaggcacaatgcgggagaactggaccgccgatgtttcatacagcagggcgatgtctgctccctgccttacggggacggggccttcgatgccgttacggccttcgagaccgtctatttctggtcttccgtcagcaaggcgctggccgaagtcttccgcgtgatccggaaagggggctgctttctcatcagtctggaagcgagcgaccccgaactcggaaaggcgtggacggagcggataaagggaatgacggtgtacggagccgaagaactgaaacagttgctgtcccaagccggcttttccgacatccgggtaattcagaaaaaagaagaactgcatatcgtcgcacataaatgaaaggagtggaacatgaatgcgattaaaaacattacgataggccatacggaacgtctttacaagcccgtgggctataccatgctcgccaatctggtcaacatcatacctttctgcctctccatcgaggcggtgcgcatcatcttcgccgcgttcgacggcagcggacgaccgctcgacacggcaagactgtggtgcattttcggcatattggctgtctatatgctggtgatggctttggccgaacgggcctcctaccgggccaatttcagaggagcctacgaaatgagtgcgtcggggcgcattgcactggcggaacatctgcggaaactctctctcggatttctttcccggcgcgaccccggcgatctttcgtccatgctcgttaccgatttcacgatggccgagacgggcatttcccaccatttgccccaactgatgggagccgtcgtcatgcccgtgctggcattcctctcgctggtatggatcgactggcggatggccgttgccatgttcgccgcactgccggtcgccttgcttgtcctatggatgagcacgagtgtgcagaaaaagttgagcggcaggcagatacaagccaaaatcaatgccgggaaccgcttggaggaatacttgcagggcattcgcgtgatgaaagcctacaacctgctgggcgaccgctttgtccgcctgcgcgatgcttttgcggaactgcgccgtgcctgtatccgtcaggaagccatgctggggcctttcgtgctgctgagcattacattggtgcgggccggactgaccctgatggtgctgtgcggaacctacctgctgttgggaggcgaactctcgctgctcgtcttcgtgctgttcctcgtggtcggctcgcgcgtgttcgacccgctgacttcggcgctgaccaactttgcggagttccgctacttctccattgccggagggcgtattctcacgctgatgaacgagccggagatggaaggcgaacggcaggcgccggccaccggcgacatccggttcgagcatgtgtcgttcgcctatcaggacaagaaggtgcttcaggacgtttccatcgcgtttccgagaaacacgctgacggctctcgtcggtccttcggggagcgggaaaagtacggtgatgaaactttgcgcccgattctacgacccgcagcaggggcgtgtccttttcgatggcgttccgatgaaagatatagaacctgaaagtctgatgagccgcatctcgatggtgttccaggacgtctatctgtttcaggacacgatacgcgacaatatccgtttcggaaagcccggtgcgacggacgaggagatcatcgcggcagccgagaaagcctgctgccacgatttcatcatgcgcctgccgcagggatacgacacgatggtgggtgagggcggttgcacgctgtccggcggcgagaaacagcgcatatccatcgcccgcgccatcttgaaggatgcgccgattatcctgctggacgaggcgaccgcatcgctcgacccggaaaacgaggtggaggtgcagaaagccatcgacacgcttatcaagggacgcaccgtcatcgtcatcgcccacaagcttaagacgatcatgaatgcggaccggatcgtcgttctggaagacggacgggtaaaagaacaaggcacgcacgacgaactgatgcggcacgaggggctttatgcccgtctgtggacgattcaagagaagtccgcaggctggaccgtatagaataacgggaagcccggataataggactttcacgaaaagccggaaagaaggcaagcccctcttttcggcttttccttattttatcggcattgtcgtaaatcagtacgacggcatagttactgtttctgactgctgaacgatgctgcgttattcattgttcgctggacctttcggttatggcagagacaagacggctacccggcctcgtgtccggaaacaccttattataattataccgaaaaatttccttttcaagtccatattctatacccgttatatcccgttcacctctcctttttatttattctcgttcttatcgctccctgccgcactcccttgtcggtgtgattttcccatgcgaaggtacagcgtcattcggtcgtcaagtaccgctccgctaaccggctcgcggatttgcccggcagccttcccaaatcgaagatgacctttcggtccccgccgtgctgcgctgtcgggttgggtattccgttcaatccccggcggtttccttgccttttcctcattttcccgctgtctggcctgcatgtaaaatctatcccgataaggaagccggaacagcttccgaaaaaagggaagaaaaagtttaacgaataaaaattaacgattatgccaaactggtgttcaacagcgtatgtgatagagggcgacgcgcaggaaatcaaaagcctctatgagttgatgaaagatttgcaggacagaaaaacgcctgccgtgaaaaacggcttcgggacatcatggctggggtgtcttgtggatgccttgggcaaggactgggacaaggtgagttgtcggggagattgggcaaacctcgaaatggtaggcgaaaccctccgctttacgacggagacggcatgggggccatgcaacgagacattcgacctcgtgtgcgagaaattcccatcgctccgttattattaccagaccgaagagccgggaatgggcttctacgagaccaacgacagcgaaggcaagtattttaccgacaaatacatagtcgatttatgtactgccaaaggcaaatacttctgcgaatattttgccgacagggagagcctgtttgcgtggcttggcgaggtcgcaggaaaaaccgtccgctcggaacaggatgccaaggctctgtttgaagaatgggcgcaggaaaaccccgattcttgctgcagtatcaatgaatatgtggtcgtggattaaatcggacagacagccatgagaacctatcattggaaagagtacggctttatcgggactgtacccgacttcgcccggcatttcgggatatgcaaaagcccgactttcgtcaatgcggtgcggagagtgtcccgacacgtttataactgcatgaacgcacgggaacaggcggaatatgaagagaagcgggagcgggtgaaacccgcttaccgcctctatctggacgaggaacgcacacgtttcatcgaaatgacgaaagaggagtacgaagctgtcggcctgcccgtggtgcaggaagaggtcggcatgttcaaactgtcttacaggaacagaagcctgcccgcatcgtttgtcggaaacggtcgggacgaaagccccgtggcttcggccatgaaaaaatatcgggcagaagccatgcgtttcgccggacaggtcatgctggctacgggttatttcaatacccgtctgccgaccgaacagcccaaaaccgagataaactatacggaattgcgattgtcgtacagcaacggtatcgtgttctattttgtcgctgaccgtagccgtgacggagtatgcggctgttacctgcaacggataacgctcgacggcaagcagatatataacggctgttttagccgatattccagcgtcgatgacgttttgcaaaagacacaatcgaacggagaatgccaaaatgcccattaccattttatagagtagacgataagccctctcggacagtaaaagttcgagaggactttctctgtacgccgtttccacggaacgacctccttttttagccaatgttccggcttttttatacagtccggcttcttccccttttactccactatcgtatctccttctttcccttatctcgtttccgccactttctcgccggttggattttcccatgcaaaggtacagcggtcgtccggtgtcaagtaccgccatgctaaccgctcgtggatttgcccggcagccttcccaaatcgaagatgtcctttcagttccctccttgctgcgcctgtcgggttgggtattccgtgaaatccccggctgtttgcttgccttcccgtcctttccccgctgtctgatctgcatgtaaaatctctcccggcaaggaaagctgaaaagcttccgagaggagggaaataaataactcggagtttaatttaacttttatgtattatgcacgcaaatggtaatcaaattatggaagggaaagttctggacgaacaggttaagataagaatttttgaggcattccggcagtcatgttttttgtttgatgaaacaagcggtcaatgcgcctatatggggtcggttcgtaaatgcgatgggaagtgtcgcctaatgctacgctttaagcagaatctggataaattgttttgttgaaaaggaattgcagccattggctgaaccttatcgacaagttcaatatagcggatagaaagatatattaatttttaatcttgacaagatatgagtataatatgtacacgatgtggcggtacgcaggtagtatgcgaagccacagtaaaccccaacaccaaagtgataacggaaatttccgacgattctttgcaattcggccggtgcgaaacctgtaaggcacgaagcgtcctgacggatgtagagaagacaaaggccgccatcaagagcggatttgccggatttgtcgaggcgaacggcaggaagccccattatgcaagttgtcggatagtatggaagtacaccaacgattccgaagacgtaaaaatccggctgctggaaagcggtgaaagtattggaaacgacatgttcttctcctgcaacagcctccatgccctcgaatctctggcggagttcggaaaagaaccgttcatcgtaacggaatgttacgggttcaagaccttaacagaagaggaaatctccgatgaaaaagcgtatgaatacgagttcggagacgagaaaatcgttgttacaggtaaagaagtacgtgcattttactcggaagtatacaggcagacggcacaggacatcgaacagtttgcagcctataatacggcaaaacgcatgtattaccggaaaaatgattgccagcttaccccggagcttgtccgacggttgctcgatgaagaacatttgatgaaagcaggtgaatccgacagtttcacgattcagttgttcttcctgtggcatgtgcggattcggaaagaacctgaaaattttgcaccgttcaaatacgctttggaagcctgttgcttggataacgtacagactttcagccgccgatacatcacgctcgaaaaagcattgcttcattgcctgaacggtttcaatgaaaacgctaatattcaaaaccgctaccaatccctgcaagactatcttctgggacaggcgcacggcaaacgctgataaatagcctcatgcggcacaagcctccgaacctgcaaagccggtttcgggggctttattccgcaaggtcgtctctccagttatatgccatacccggcatgtcacaagaaattcctttttaagcggacgtccacctgttataacccttataccccatttccattcctttctacctcccgatagcgtttcccgtttttgctcctgacgttacccgacaaatcaaggcaagacacacgacaccctatgcagctgcaaaggaacgtcggaggagttaaactcttttatatcacattcctgtgaatcttaataaaaaaagtcgttcatggcaccttgtggaattgatttttatatatttgcttctgaaaaaaacatactggaaacagtgccggatagtatgtgaagaacagaaacttttgggaaaataatatgtaaatacaaaattataaaaacaaaaaaatgattagagttgccacgataaaggatgcttcaagacttgcggaaatacagattttctctaaaagaaaagcctttcgccctatttttcaaaacgatgatgtttcctttaatgaaatgtcggtattgcgtcttgcattatattatcaggatgttataggagctttggacgatatatatgtttttgatgacgggattgtaaaggggatgatgaaactggattgtaaaaacagtatatgggaattgaaagagttgtatgtagatccgttctttcaaggagaaggtgttgggacaaaacttatgcgccatttccttacaacagcaaaaagtcacgatgtaaaagaggtttacctgtgggtgttggaagaaaattttgcagcaagaaaattttatgagagccacgggtatgtctatacaggaaataaaaaagagttttccgattcaggaaaatatctgttgaattatgcattacgattaaaagccaccttataatccggctcgcgttccgaaaattccgctttgccgggcacgtgaagtcccttggacggtcaaaaggttcagggggctttttttgtcaatcgccctcacaggcagattttcttttttagccgttattcccacttctatatacaatcgggcttcttcctcttttattccggttatcccattctttccctgatctcgcccccgttgcctcctcgccggttggattttctcatgcaaaggtacagcggtcgtccggcgtcaagcaccactatgctaacggctcgcggatttgcccggcagccttccgcaaatcgaagatggcctttcagcccccgcctcgtacctcgacgggttgggtattccgtgaaattctccggccgtttgcttgcctttccgtcctttccccgctgtctggcttgcatgtaaaatctctcccgccaaggaagccgaaaggctccgaaagcagggagaagaaaaaagcaagttcaacaaattaaaaatttaaagttatgcacagcaagatttttcaaattaccgaaacacgggtgagcaaggacaactacctgaacgaggacaccctcacgcagggcgacgatagtttctttgactattgtgcggagattgacgatgaggaacgccagttccatatcgacaacttggtaaacaacattctgcccaaaggcatgttcgagcttgtttccgacgataccatacgctacaaaggcggtgcggaacgatggagagaagatttcatcgcagacattcgaagcagggcggaagcccttacccccgaaagcgtgcaggactggattggcccggtctatcaactcgaaaagttcctgaaaaacccgctcgataccgcttactggttctacatggacgaggaggggctgcaatccaacgccgagcaatcctacgagttcctgcggcaggcatgtgaatttaaacccggtacgctgctttacatcggcggtgtcatcgactatcatttttaacctcaaaacgctgaacgatgaaaggtacggaacatttcaaacggactatcaaggaatacttggacggcaaggcacggacggacgaacttttcgccgtctcctatgccaaagaaaacaaaaacttggacgattgtatcacattcattctcaatcaagtcaaggcaagcggctgttgcggaatgaccgacgacgaggtgtggtcgctcgccattcattactatgatgaggacaacatcgacgtgggcaaacctatcagttgtggcgtcgtggtcaatcacaaggtggagctgaccgaagaagaaaaggcgcaagcccgaaaagacgcgctgaaagcctatcaggaggaagaaatgcgcaagatacagcaacgccacagcaggccgaagccgaccgccaaagctgtacagaatacccaaacggaactctcactcttcgatttctgaccatgaaagcacggacaaaatttcagcatcaggtagtagccgccaacgggcggttgctgcctatcacggagaaacaggcagaatgggcgttccggcataccgtcggacattacgcttttcgtacaccgagcggacaaacgacctgcctcgattgcggtcataggtggaacgagacaaaggcgaagcgttgccattgcccgaactgccacgccaaactgacgctcaaagacacgctttgccgcaagacagatgagaaaagctatttttctgtcatcaccacgcaggacggatttcaggtgcagcggattttcagaatgaatgtctgttaccgcaaaggcaagaacgcatggacagacgtgtgcgaagtggcgagatactggttggacgagaacgggaaaaccgctttgacagccttgcaacggacaatggggtgttatttggacagctttctgtacgggtcgggattggaactgcggaacgacaattacgtgtaccaacgcatagccgactgttatgtctgtccgggctacacggttatcccgaagttacggcgcaacgggctgaaagggtcgtttgccgacatcgccccgcaaaagctgatgaaagccctgctatcggacagccgagtggagacaatacttaaaagtggacgcaaacgagacctcaagcacttcatcgaccacccgcaggatttggatttctgttggccgtcctacaaaatcgtgttacgccagaagtatcggataacggacattggaatatgggtggattatctccgtatgctcgacagatgcggcaaggacttgcacaacgcccactatgtttgccccgccgatttgaaagccgagcatgacaagtatcagaacaaggtgcgtattctccaagagcaggaaaaacgcaaggagcagatgaaacgggcgagggaaaacgaggcacgttttagggagttgaaaggcaagttcttcggtctggagttcacggacggaacgatagtcgtccgtgtactggatagcgtggaagcctactacgacgagggtaatgcgttgcaccactgcgtgggacagtgcgaatattacctcaaaccggatacgctggtattctccgcacggatagaggacaagagggtcgagaccgtagaattgagcctcgaaacattcaaggtgctgcagtcgagaggactgtgtaataaaaatacgaaatatcacaagcggattatgaacctcgtgcataagaacatcgcccttatccgaaagcgcatggccgcctgataccggctgcggaagttatatcgggcaaccacctgccaatcgggacaggtggttgttcatattcccgataaaggccatgtcgaacattctgttatacagacaattctttttccattcccttacattttgtccgatggacaatcgttcgacgttttttttgccctttataccccagacacatactgccgtcgtttcctgttgtaacggccggagatctttgcctccattccctttgtatgcttgggcgtatcatttcatggaatctccactatcgccacggcctgtttttacgcagcaaaggtacggcgaacgaacagcgtgtcaagtaccgcttcgctactccggataaaatttgacgcaaactttccgcaatcgcagattgcggcatttcataaaattttaacctccgttccttgcctgctgttcttgctttcgccgttgggaattgcacgtaaaaatcaaccctttgggcgaagtcggaaggcttcaagaaaagggaaataaaaaaacagaacaatgacagcaatagaacagattatcgccatagctgaacaattaggctggcaagttaaaaccgataccgacaaaccgaacctcgtggtgttcgattttcagcaatacacacctcacgggcaggatttcagtttctcggttgagatgaaaggcaatgacaccgacagcttgttacaggaagttgaaacatattacgaagacttcgaccccgactatgaagcctacctgtggattggtacggacgggcatggcaagaacggcgcaccttaccgaatcaaagacatcgtgagcgatatggagcaggcggaagccatgatagaaaaactttatgaaacattaaaaacaaccatgcaatgagaacgaaaaccctctacacacgagacgccgaaaaggcaggaataagccgtttcccaaactttcaccgcacggggaacataaccggcatgaagcagctttactacggaaaaaacgccctattggtacgttgcgggagtcagatttacaacgtatcgagcgaacccgaaatttactacaacatggctcattaaatggtattcattatgaaaagagcaagttacaagaaagattttcagagttggaaaggcataatggctctaaaactgctctgctgcaatatagttgcaggccgttttgattggaagaaatactgtacgccacagtcttattgcggtcaggaaatttgcgttgtaccgctgcattgctcctacggacagataggctataccgtgcacttcccttattccgatataccggaagtggaatacgattgggaaatgaacaaattaactatcgacaaagagaattgggaaagctatttaacgtgagtataattcaaaatatagccagttgcccgtctttgaaaaacatacatcaatggcgggcttctttcaaaaacagtatgctgttatggtagaaagggagttggaaataaagttatattaaaggaagtggggcatggaatattcaatatctttatcttcaaccatatatttttcctgaaattgagcaatttctttgcaaaaatcatctgtcatacaataaatctccgtaattttggtctctgaaaacatcatggtaattgcttaaatgttaattgaatactataaattcaatacttttattgctatgtgcctaatttatttacagaattagaattgaaagaatatgacacagactttttatacccaatggcaatcttctgtccttgcagacgcagaaacttatgtttcaaaggaatacagcctcaaatccgcaactacgcgcctaatatgatacagaagcgaaaagaatctgcatcgttgctgaattcaagttccaaatgcaacggaattcatattaataatttgtttaaatttttcgtttggtgtgaggtatccaagtcttttacgaggtctattatttagattgttttcaatccatttaatacgcttgttggttacttcactaaagtccgtaccctttgggatatactgcctgataagaccgttagtattttcattggcaccacgctcccaagagtggtatggcttacaaaaatagaaattaatatctaatttttgtgctatatcctcgtgttttgcaaattcttttccattatcagccgttattgtgtgtattaagttttttacttttcgtaatgcccatactgtaatctttgctacagggatggcttctttccctgatagcttacgtatccatactctgcttgttgctctatcattaatggttagaatagcacctttgtgattctttccaataattgtatctatctctaaatcaccaaatctttctttttgctctacaattgaaggtcgctgatcaatctccactctattcggaataaatcctctacctgcgtttttagaaccacgctttgaatatttgcgtccttgccttctaagagatttatgaagatccccaccttgtcgtttatcttgccatatccaacaatatatagtttcgtgagataccatagctatattttctacttggcttctgcccactatctgctctgggctcaagtcctttcgtagaagcttttttacacgcttcttcatagcttgtgtaaatacctcctttcgcttcttttcaaccttacgtttatctgcctttctttgggcaagatcagggttgtattttccactacgactatcgcaattgcgttttatttctctataaatattactcctatcaactccaatagcttcagctatatcttttttactcatcggaacttgcaacatcttagaaattgcatacctttgcttttcggttatatgtttactcatctacaacttttatttctttggacggacaataaaaacaaagatagtaacatttatccattcagcagagaacagagggaattgtctctcttttctctctgaaaaaaatattacttatgcagctattaatccttttctttaaaagttgcatttataacttgaactcaaggttagtaaaaagggggcacagtgcatcgaatgtcaccataaagacatataaatgccccttaccccaccatgcgacttgaggcaatacgcaaaatcacgactataagttgtcggtgttatccaaagtcattctggaacacattggcataagcattgttgcatgaatagatattcagcacatacttccttgatgtcctgacccatttggctggcacagagatgaacttaaagacaaacgtcttgatgcggcttgttgctttgagtccgaacctcttcacgtcaagcctcgccatgatgaatttatagaagttgcgtatgagtgccataagcagaagaaacaccgtgttttctcccataaaggattttggaagcctgttccagccgaatccgttattcatatcatcgaagatgcgttccttccctccacggaggttatagaattcgacaatctctttctcggaagactcgtagtcatttgtaaggatgcagcggtaggtgtattctccttcccacaggtcgagttcgccgtctatccgcttctgtctttgaatcacaagacggtatgccttccctttccatttctcgatgagaatggaggccagctcaaactcaatgccgcccaattccactttcttccaacctctgagggcaaagatgtcattgtagagcgaactgcatcggttagcacggatatagaaggtcttgcagtgtttagcaatctcttccactatctcttcagaacacgagccgcaatcagctctgaaacggttgataataagcttgttttgttcaaacctttcaaagaacctcttcagcgtgtccttctggtggaaacggacatttgtgttgccgtcgctgttctcaatgccgacaatcaagttgccaataaccgccacgccagggcgataaccaaggaacttcttgtatgtaggcttcgcatcaaacttctcagcctctatgaactggtggtcgaagtcaacgtcatacccctcgccctctttcagctgccctgtggacaataggcaattgaggagcagtgtattcagcttgtctgccgtgttgaagtcgtaggtcttgccagtgtcggatgtgtaggaaatgttatcctgggtcagttcctttatggctctaagaatcgtgtcggcactgcatgtgcgaagtgtcggatgaagcgaaaggtggtacatcagatgagtggtgacatcctcgatgcatgagccgccacaaaaataaacgctcataagcgaacggatgatttcgctgtattgataaccatacagcctgcatctcataccgagggttgagtcgattacagatgagagtctggagtcaaattgctccattattgaaaatattcctccaaaaggagtgagtttctcggatttaattgctacctttgccatgtctgtcgggtttgatacatattttgatttgcaacactaagataggtgaaaaatctgacatggcaaattcctgagcaactttttgttgctcaggtacttaaaaagttatatttgtaatagtgttgcggaattaaggtacagtaatttccaaacggcattgctacgtgaaatatccaaatatgcagaagccgtggatgcggcggtcgtatccgagaataaggggcattattatacaagttgctttattgaacgtaatggtaagtttgtatacataaaccattctgcggatgtgcggatggatgatgggataaagatagaactcggttcgttcatgatacggactgcccggcacgcaaaggattataccggcggaaacaatcaatattgcgatatgctgcagttacagtcaatgattgacaaactgctgtcgtaatgataacatatagtctgtagcggaatgaaaaccggtagggactataaggatgtggagcgccttcagtatgaaatcgctccacattcttcatattacgctgccgttaccgacgcagaccgccgccatattccgcctcttgtagctcctccctgtattcttcaagctcgttcagcttctcgttcacggcttgcaggttggcctccagcgtcatgttgtggtcataagggtaatgatgttgtacggccatccctgcattggtggccgtacccacgtccagcgtatccttgtccctgttgtaccttgcatacagaatatctccgtttggcatttcgaataccggcattctctgatgtgtcagttcagcaaactgttccgccgccatatctttggccacctctttcacatcatcgctggcacggtctgtgccgtaacgtgtgatatggtcccgcacctcctgttccgtgtatttcagcatgatgtcgtatgtgcctccgacacttccgttgtacaccacggcaaagtccttatcttcaatcagcaggtcatcgccccggttctggaggggagaagcgtatgtatgctgctcgtccatgccgttgccgtcgtaatactccttggcgagcgcaagcagacccttgtagtcgcctttgtccttcaattcgtccagttgcttcgtgtcgtcagcggtttggagataggccaccgaagcataaaaaatacgttccttggcagagcgtttgtcctcttgctcttcggtaacattttgttccaactcctgcgcaatcttatccaccttttgagtaacgattgacgaagctcttttcacgtccagaagcgttgtcttgataaactgtggggattctttcaactcatcgagccaccctttgaggtatgcgcaactgtcttcctttatatgcttggtcatgccgtagcgttgtgcgaccaacgcgctgcccagttcggccaccagttcctcgcgggcatactctttcgaaccgaaagaggtaggttggagtcggtcaagcacaccttcggcacccgtggaatggaccatctcatggaacagcgttccgtagaaagattccccgtctctgaactgctccttttcgggtacgacaatctcgttctttgtgattgagtagtatgcttcgttttggtgcgtcggtttgatgggacaaatccaaaggttgtcctttatcatcgcatcgacaggcccaaaactgaaatgttcgccgttttcgacccttttcccgttctctctttccaactgctcccataactccggtcgagcctcctgcaggttggtctgggcgacattgaacacccggaacacctgcattttcggatagacattgtattgcgccttctcttcgtcggagagtttcttgtagtcgtcgtacttgattttctcctttgtttccttatgtatgcaggtgaatgtggtcagcatgacgggaaacgatttctcgccgcgcagtacagatacacggggtaattcctgcccgtccttgccgggcttgttgagccgctgcacgcagtcaaaggtgcagaagcgcggaatcttgtacccctcattctcacaatgcaacagtaacataagggcgttcataccgttgtactcccgcccggaaaggttacgcggccattgcagtgccccctcggtaaaccacggcttatgccagtccttgtggatgctttcgattttctcgatcatcatctcggcaaagaggtccagcgccttgtcctcgctgctcggcccctccgtatttcgctttctataaccggccatgactgctactgattgaagttatccgattcgggaatatattgcgccagttcttccacccggcaggagatgtccggcttcccgttatgtaccgagaccgtcatttcgcccttggcttctaccttgacgcccggttgcagccactcttcacgttgcctgtcgaagcagaagaaacgcacccattggtactcgaaattctcatcgaccttttcggtgctgaatgcagagaacatcgtgtaggacttatcctttttgtccttccgttcctcgatgttcttgcccaccttgccccggaacgacagttcgcccttgatggaatccgcgatgtccgccgccgggccgatacggtcggcaaagaggttgaaatagagcttttcgccccggcgtttcaggaacagcgtccccgcaacctcgacacgcaatccgtttcgatagccggataccttcttctgaccgccctccttgctgacactgatctcgaccgtttcgttccgaccgtccttgccttggagcacgacgcggagcggaaaggtcaggaatgttttctcttctttggtcgtgcgcatcgaagcgtcgcggccgatggtgccgcacgccgtaatattgcatttaatcattttattttgtcttttagtgatacatagtccaccggacaaagcggggtgtcttgaagttgaacaggttgaaagcgtttcctaatcgggagcacgtattctcatgtagacaatccagccggcaatacccagttggacgcccacgataacgagtgttgctacccaaccgaatagccgggaacagaacaggatatgcagggcgcagacggacaccccggacaagtacccgcaaagtcgtatcatcacgcgttttatcatgactttttgggattatcttttcaggttttccgattgtgcccgttgttcggacattccccgttcaaagttctgcgacgccgcctccgagaggatgaccgtgttcagcacgccggtcacacgcagccgtttggcttcctccgaaagagaactgtcgttcagcgtcaccgacaggcggcttaactcggcagaggccagttcccgtgatacctgaacgctgccgttgtccgcctgcaggacagctcgcccgttttccccgactgtgaggtcacaggttttcatgcccggcagcaacgctttgaggtcgatacgccggctgtccatcgcctcggaaatggctgccttttgttcctccttgttcttgctgtcgatttgcgtcgccagtaacatcagggaggtaaaggcggtcatggccatttccacgacaggatcactgcaccccgacaatcccacgccgctatcctccgaggagagcagttttttcatccacgcatcgggcgaaaggcttttgccggtggcattctcttctgttcccttatatcgggcgagcaggtcgttgccgttatgtagtacctgctgtttgatgtggcccttttgtgcgatttcagccagatacgctgccggatcgacgtcccgctgcgtgccgtccgcataaatctgccggacaccgaagtgcaggtgctccccggtcgtccgtgtccccgtgttaccggaacggccgagcttctggcctgcctgtaccgtatcgcctgcctttacggaaacttcgccgaggtgcatgtaggtacactgtaccttgctgccgtccggacgggtgtattccacggtcagcgatttgttaccgggtgcatggcctttgtctttgacagcgacgaccttgccgtctttttccgtggccaggaccgtatcgccgtcgcaccggatgtcgatacccgtgtgcatacgttccttgccgtctgccggatcttgccgcataccgaatggcgaggtgacgaaaagaaactctttccgctccaccggaaacgaatagtccactgtatttccgacctcacggagcgggttctcttccacgccgaaccgctttccctgcgtctccatttcctgcatgacctgccggtcgtacttttgcagcccgttctgttcgatgatacgttgcaggctgtcggcataatgcccgcccgtggcatagcccgccttttcgaggccctgtgtccagcccttgtagtcatcgggcgagagcgagaaacagcgggcatagcggctgttctctttcaggaagcgtgagtggtgctcatacgaatcgcccacgctgtcgtagctgcaaaacttctcgttcggcttgtcatcggaatacagaccgtaccggccaccttcggcaatccattcgggcgtggccttgatgccgaaatggttgttctcattcacggccaaacggctctgcccgttggaactttccagtatgccctgtgccagcgtcacggaggccggaatgccgtacctccgcatctgtgccatcgcataatctgcgtattgttccgtatattcttgattcttgtttgccatatctttacctcctcatggttggacgttgttcgttctcgttctgttcgtcagttgcctctgcaggctcgttttgctgcgccttggacataccgtcacaatccatcacgtatgcccgcagcgcatggatttgctgccttgtttcctcattgctgtgttcaaataccaatatgattttgtccgcatcatacggaatgcgttctttggccggaggcatgtccagctcgttcgctatggtctccgcatcatacatggaagcgtaatacttgttctcatgtttgaaaaggacgaccgcttccggttgttcctctttgattttcttgtatttgtcatacagttgttccggtatatcttttatgggcaactctttcaaggatgaagcagttttgggggattcctcattggcttgcttggggtgcttgtccttatcctgctgtagggtatcctcttctccttgtttctttccggcagtctcttcctgcgtctgtcctttacgcagcacatcggcaaaaagcgtggccgccagatggcgtttatattctgcacggtcctcggccagccacatgcgctgccactgttgccgcgtgacgctccggggctgcagtttcttcccgtcgatggtcgccacgcacagagttccttcttgtttggtcttgaatacggacacacgctgaatccggttcaggtcgatgtcctgcgccccgctgctgaacaggtccactttcaggtctggctgtgtttccgccagtacataatacttgtgcgccagttccatgcgtaccttgtcgatgttgtccatcgcctgtttgagcgtggagaaaaaacggttcacgtcctccttgtctggatagatactgtacccgttctgatgttcgggcttcagatacagcgcccagcggttcttgtcgtcctggatcatctgtatctggtcgaaaccgatttcgtccgcccgtttgaccgcaggcgtcacgtccagtgtggaaagcatctccagtgcccagttcttcagtcgggccagtgatacctgtttcttggcgaaataggcatcatcgggcctgtacccccatgcgccgtcgggattgaagaaacgcacgttttcaataccttcccttcgcaaagccctgccgatacgggccttgttcatgcccggcacttcgttgtccacctccggcgacgcaccggcagggagtatcacatccgccgatttcgaggacggatcgatgacgatgacaatggtcttgtcctccttgttcgggtgtttccggatttcatcggccacgtagaaatgcttgggtaactgctcctgcatatccgaagtctgccggcggttacgcatcgtggcatattcgattttctcgccccgttccgccttgtggattacttcgagggcgttgttcacgtcgctttcgagggcatccatcaggttggggttctctttaagttcccggttccagtagtctaccaattcaaggcttttgtcggacagacgggcaggcagtcccagttccagcattttgatgcccgaagccacctccacgatcagccgttcctgtttgagggcatcttccgaaggacccatgccgtttttcatcaccatgccttcacgggccagccgttgttggtgccccgtggcgctcacgatttgccgcaaggcttcctgaacgtagtcgttataatgctcgaagttccgttggcgcggcatatagaccgcatcgcggtccgtctcgtaatggggcattccgctgccgtccgaacgcacgggcacgagattgtcccgcattttcagcaggaagtcgttgaagcggatatgcagtctccgttcatcggtttcggagtagccacgctccacggcactaccgtctttctgcaataccgcatcgtaagtctccttatccacgtagggcagtgtcgtctggtcgatgttgaaaagtgtgcggatctccctgttatgtatgcccttgtactgtttctgcacctcctcgtccagtttcagataagcgtcccggctgatgatgtcctccggattgttgcggtggacgtacttgttccagttgtagaacaggaacggaacgccttgctcgtgctcgcgtaccgatgtgccgcgtgccttggcatcgctgtaaagggtgaacaggttggtcttgcacccgttccggtccgaatgcaaggccatgaacaggccgttgaacgggctgacggcaacacctttcggataaaatttcggaaagcccttgcccgtagcgttgagccagtgtcccccggcattcgacgcttcgttcaaagccgtggagagcagctctatctgacgctcctcggcattcttttctatttgcgatttttctttcatattcccatatttttatcggttacaggattattgaatgccccgtgtccgcacgatggtttcctgctgtccgttgtcatagttctgcgaagccatctggcggagcttgtcgctttgggcgagcacggcattggccagcgtgttcagcggcaaggctcctgcacggtaagcgtcggccatagcgggggtgagctgcaccgtacagggcacacggtctatcgtggcaaccagcgtgcagccttgtagtgccgggttcacgatacgcggattcagcggctcgtcgggatagcgtctgtactgtacctctctaccggtcgtggctgcatttctgtttccctccgtccgttcttttcccagcacctcgtgtcccgccttgttcagcaggttcgcgccacccaagccgataagcagcatcttcaacatcggattcttgacgaacatacctgccactatactcgctatcggcagcaggttgtctttcaggcccagcgattgtgtcctacctgtaaacacgcccagcaggatgtcgggcagcatggccagtatatagcccagattacccgcgacatcgcctatgccgtccagtccgagcgagcggaccagctcgtcccagccgttctcgttggtctgtatggtctgtgttccctgacctgcctgttcctgccgcatcccttcccccgcagagacggcggaagtcgacacttccttttcctctttttccctttgtttgggtttcgattccgtctgttcctccgtttcggctttccgtctttccatatcttgcaggtaggcttcctcttgtccgggagcgacaaccatcggcacgtctttataccgttccacccgtttccgttcctcctcggcggtttcttcccgccacggcatatttctattgtctgttttccaccagtccataaaatcgaatgttacaatcggtatcttcttttgcaactttccgttggctgcggcaagagccgtgttttctttgcccggtatgcttgccgcctctttgcggaagctgtcgaacacgttgctgtcgctgccgaacacgcccttgctgatacactcctctgcagagagcggctgcgtttcctccttcccgaaatggtcggcaacggctgagattgccgtatccgcaccgatgaaccgtgcaacggccgtccacgaacccgtaccgcccaacatgaccgtatcggccgaagcccccaacacccagcccgcacctttctccaacttgctcggccggtaggcaacctctccgcgtttttctatctcttcggccagcggcgagcgccccaaagcctgtggcaatcccagcaggctcgattctgccgccttacggatgatgtagtccgccgaggatttgggcatacgttccttgaccagttggtctatcatcagttgctctacacgatagtccacgaaggcataggcgaggtcgcagcccaattcctgcgacagtttatcgtaacgctcgcgtccgacttccttcacaacgacatcgcgccactgtccggccatgtaggcgaggtcgtgctgcatctcctccgacgagagaatcctgtccttgcacatcccgatgtagtcctcggtcgtcttggagttccactctcccgtaaccttgagagtctggtacgggtcggcgagcggttgccccgctgacgccatcatgccgagtatgccgcccagggaggtcgaatacgctttcatttcctcgccctgtttttcggtcaggtaggattgcgtctgcgtcatgacggggacaagatgatggcggaaataactgctcatcagggcctccaactccgcaaaccttctgctatgtttgattccgtccatataatcaatgtctttctatatcatgtttatttgtttcaacagttgttccttcgtctgctcgatagcgttatggtacacctccatttgcttggggaaaaactcttcgagccacgtgtccttttcgatattgtcgtgaatgaaacgtatcgcctgttcccgctcgatttctaccgaggcttccccttcctcccggttgttgaaccatgccttcgtccaccagcggactccggcacggtcgggatagacggagacgattctcggtatgtcgaagctctggatgtcgatgtccagttccgccaacggatcaatgagtccgctgcccgctacggcttcgtcatgaagtttttttttacctcgccgcctgttgcggaaaggtacacatcatgccgcagggcaaggtagttcaggaaatccgctatcagcaggttctgtaccttgcaggccagcggcatggctttgcgccccagtcccagcgggttgtacatgctcggcatcttctcatagaaatactccttcgcagctcccattgtaaagatgtggcgcagcgactgctccgtatgtgcgggcaccgtgtacgctccccgctgtaaatcctccatgtaaagtggcagaaagcggagcatcagctcttctatttccctttgatccttctcgtagtcgttttttactcttgtttccgcatcgtaaaaagacgccgcaccattgccgtcggcttcctgcaaagccttgatgttgccgtacaacatggtcaggaactctattgggttcagttcctcgcccttgaatttgacttctatatgcagcagttcgccgctcaaagccaccgtttgtccggctttcacccgctgtccgaattgggcgaatacattcgacagatgaccgtatgtcacctcgtacccgccgtaacggaccgtctggcaaatgccatgtaccgggtcgttgcccacacctgacacgatgccgctggccacggctgacagcatgtaacacctcacgttgaagtctattccgtgatgaaagaacttttctcccgttgccgggtgtacctgttcgccgtagccgagcgacatctccacatctttcccctgcggctcctcgaacggcatacaatagccgctgtcggagtgcagaatcatttcttccgtatatttcattgtgatatatattttcgtgtttctatcttctcattcctccgctttgcgtttgttcctccggagagagtgtcggcgtctgtgtcctcgataccgtttccgagggaaccgtgcggacaacgcccgcattgttgccgataagcatcatgcccagaaacagaccggcgattttacccagccagccgaaacgtccgaacacgaggtacgctgctgcgataagtcctgcaatgttcaatcccgacacattgccccctccgaggtttcgcaaaaagccgctgagcatgttgaacaacccaccgccggaggcttcccgcaggaagttcgataccccgttcagtttcgagtccgcgcctcccacagcctcacctatggcagagaccgtctctccggctttgtctttcagttccttcatgtcttcggtcgtacctgcaagggcatccgtggcggatttgccgactacggcctcactgacgatccgtgcgacacttttgtcggtggtcagtttttcccaacccacataaccgacggcagctccggcggtagccgttttgaccgcctgcccggctccccgaagggtctgcgagggatgcagtaccgcatgaccggcacttttccccgtcgcattggcggccttgcccatgcctttcatggcctttccgccgtatttcaatatcgtatcccaagctcccatatttttattcttttttttagggtcttacatttcttccaatttgccgccagcgtctttgggcggctttcacgatgtcgtacttgtccgcgacagggcgtgcgccctcgtcgatttcccgccagatgtcgcccatcgtggtgtatttcactgccttggtcagtcgctgcagcgtccggttcatcgaccggagtttcggacgtatgccgaacacgatctccatacgttccctttccgtcatcttgttgtccgagaggcaggccgtgcgtatatcgttcacgatttccacgctgttcaatatcatctcccggtaaatctggttgcgccgcgtggagagggcgacggccaatgcacccgtcgaatgtctgctcaattgtttggtgaagtcgcccatgttgtctgtaagctgcgatatttcatggtaaaaaccgtaaatctgagccgcatagcagacaatcgagcggaacgagttcaggtaattgttgaactcccgttgcaagtccgtcgtgccttccacttcttccttcgtccacacatgccctgtagtttgcatcagcatgaccttctcttggtttttcagttccttctcggccttgttggtataaaccagaatcattcccgcaagggtcgcatcgttctgcgcctgtaccttcgagataccggcgcacagcaacagaatccatatcgagattatccgcttcatcgttcttcgttttttattatccttttttcaacgggcgatggctgccgccctgcgccagcgggacatggccagacgggccacctcgccgttgctgcggtctatcatacccgccgttatgttgttccacacgtcgttcagggtataatagcgcaggctcaaatagagcagatgcagtttccggctgaatgccgcgagctggtcgttcaaagcccacagggttttgctccgttccgcccccgtgagcatgttttccgtgccgcctttggccacggcgtcgttcagcaacgtgaacacggaaaccagctccgtcgccgtctcgatatagaggttgttcatgttcatgctggcgacgatgccctgcgggttgtccccgatggctttgcccagttttcccagcgtgaggaaaatccgcacgccgtcgttatagaggtgggtacaggctttcagcgacgaagcataaccgttcgccgtcttgaggtaactgttgtactgcttttcccactcatgtatgcggttgaactccgctgcgatactgttctgcatcagggcggtctgtgtctgccccttgatttgtttgtctatctggccgtttatcagttcgtttccctcggccaaggctgcccattccaacgggttcgaagcggcaacctgcgccttggccaattgcggaagcagaccggcaagcacaaagaccacccatatgctaatgattcgtaatctcatagattcccttttttcgtttattgatttccacacgttcacggataatcgccacgatgtcgtttccgcgccggataccgataaggtcgagcttcgggctgttccggtccgtcgaaaggataacgaccgttttcagaccgcaaagctgttgcaggaggctctggtgttcctgaaagtccacgatacggtacagttccatgtagtccaccctgcggcagaaaagtccccgctcgcagacaagctgttcgttgccgacccggtaacatatccggcgcaggcaaatgaaacgatacagcagcacgaggaacagaaacaaggcaatgaccgtcgccataccgccaagcggcataccttccatgccgccgtacaccagtcccgccatgcacatgaatatcaatggcagttcgtcgatgacgaattgcccggcgtgcgggcgcaggataatgttccggacatcttgtatggtatatggcatggtcatcggcgaaagtgtatctgtcgttcctgcccggcgttttcttctttttccgactcctgcccgacagtctcttcacgtttctgttcagccaaaagctgttcgttccagctcgtatggcgataatccggactttcccaggtaatggagacatcatgctccctgtcaataccaaggaactcccgtagtttctctcgatattcccggtagcacttgttcgtggtatctatctggtcctgcacgtcttccggggcacacaacccgctcgaacgcatcgactccgcttcttccgattcggcgtcgaaccgtatgcagatttcttgcaaaccacccttgggcaataggtaaaattctccgtctgtcaaatccccgccgtccggtatggaatcgagatagggtttcctctccggcgtttcctctatggcaaaacgtactgagcggcatatctccttttgcaaatcccatgtgagattcgaccctttccgggtattatcgaaacagatatgttgccgggcagggatggtaagatcaagtatctctctcatctgtttcccgataggcttgccgcccgttgagataaagaccgcctttctcaaatccttgttcttcgcctgatggagttggtaataggccatcgcgtcataggtactcccgaaccagtagatatgtttggcctcggcaagaggtgttccggcaggacttgcaatccacaacccttcgctctcattgctttcctcgctcttgcctttatagctatcgcatccgtccattctcatacgttcccgttcctcgaaacccacgaccgtaccgccctctttgggcaaggtcagtggaaaagcgagacaggtgtatgccgcaccgtctgcgccgtgttttgttgccaggcagaaatgacggtggaaagcattctgcgtgctgaggtcgataccccggttcttgaaatagggatagaatatctcctgcatctcatggtcttgagggttgaatctgtgcaggtcgtagtctgttatatcgaatggtcgtaggtcttgcttgaccggtacggtttgcacctcgtattcttcgaaggggatgttcagcaggcggctgcacacgaggtttaccagccggttcaggtctattccctcataatattccgcgaataacgccgggtgctccttgatgaacgaaacgacgttgtattccttctgccggggtggttggcaacagcattttccctgttgcgttatgacgaacttgtcaccccggatacgcttttcctcactgtccgtgcggataaacgaggagaggcgtagtccgaagcgtcggttctggcgatacccggcatcaagcagtacatcccggatatcgagtctttgcaaaaaatcattatgtgtcaatttcttgtcattcattgtcttctcttttcttttgttgtttcatgtagggggtactgcgttgtcatcggtggaaacgtgcttgccgttcctgttcgggttcttctcttctggccggctcttcgtgaactgattcttgcagcctgatctttgccaagagctgttcgttccagtccttatagcctttttcagcgggctcgtacacaataaggtcggtgctgtcctcgccgggagcgggaagattacggatcgcatcctctatggccatgatattttgtctcatgccctccagtgtttcctcactggccgaaccctcggcaagggctatctcgtactcgtcttggcacaccatgctcatctcctgcaaatatccgtcgccgattgtccgatagtcgagcgtaccatcttcccgatagatttctttgggacgtaaaagcgtgccgattatcctgtgaaagtcgaagggttcgagttttatttcgtagttctggttctcctcgccactgatacggaccagcagtttgtcgtctttcgtcacgttgctggtgaatgtcttgcccgcctgggtgagcgcgaagttgatggcgaagatctgtccggcacggtcctggtcgaagcagagatggtggtaagcgcgtggagtggcctttatcatggctttgaactgctgttggctcggtgccccgccggtagaaacgaacactccctttcgcagttccttgtcccatttctggttaagctggtaataagccatcgcgtcgtaggcactctcgaaccaatagatacgcttagcttccgcaagtggggtttgggcagggctggcaatccacagcccctcgctcgaattgctgccctcggccttgcctttgtagctgccgcttccgtccattcttgcacgtccccgttcctcgaagcccacgaccgtgccgtcgcctttgggcaaggtcagcggaaaagcgagattggtgtatgccgcaccgtcctcacggtgtttcgtcgccagacagaagtggcggtggaaggcgtactgggtgtagaggtcgataccccggctcttgaaataaggatagaacttcttctgtgtctcccggtcctgcgggttgaacttgtacaggtcgtagttcgcgatgtcgaacgggcggatgtcccgcttgggctgtataatccgcgttgtccggtcctcgatgggatggttcagcagccggttgcacacgaggttcaccagtcggtcgggagacatgcccgcacggtattcagcgaaaaactgcgggtgcgccttgatgaacgagatgatgttatagactttctgctgctgtgcttggaagcagcactttccctgttgcgtcacgatgaacttgtcgccacggatacgccgtccctcgctgtccagacggacatacgagggatagcgcaggccgtcgcgccggttcaggtggtagcccgcgtcaatcagcacgtcctgaatgttcagcctttgcaggaagtcgtcgtaggtaaggtctccttctctcataattgtctttatctccctcttctcatatcgttaatatcctgattcatctgtgcctcgaaattgcgtatagccacgtccctcggcgtatcgacaccgggcttgaaatacggacgcggctcgcctccgaaacgctcaccgtagaactccggaccgtgatgatgatgccgcaggccgtggacgacacccgccgtgacgaccgttcctgccgcaagggcggcgaaaatcttcacgccgagactgcgctgtgcttccggccgcatcttcatgtccacctcgctgaatattttcgaaaagattttcatgcggtggtagtcatcgaccgcaaggaatttgtcgtaatccttctggctgatctcgtggctgatgacctgcccgtcgatgacggccgtcatcttgtacttgccctctatgggggacgggtgtacggctatctcgccgacctcgacctccctgccgtgccgttcttctcggtaccagcccttgcgctcgtcaaggacggaaatatcccgtccatcgacggaagcagccgcaccatacggcatctcctgccggagctggttttccagtggggagaggatttcctgctcctgttgctgacgctgcgtcagttcctcctgtacttcggggtgcagaccaagggcgatacgttgtttgctgtcgaggtccgccatcgttaccttgtcggcaaaatccgccccgataaccccgttcaggacttccagccgcttctcgaccggttgttcctcgatggagttggaggtcaggacggccgtttcttcttccgtcaggtcatagaccagatcggcggtcaccttttcggactgtacggtcagtgtccgtgcctccttatcgacgataaggccgtgggaggcaagacattcctgccatttctcgttggaaaaatagacaggagagcttatcagttccttgtaggtacgggccggttccgtgctgcgcggacggctgaccagcggcgtgatgaccgtctgcaggttttgcaggacgtcggcctgttgtgccggttgcaccggttgtccggccttgtatttgtaatagaagccgtagccgcccgactgcaattcgcccggcttcatgcgtccgtcccaccgttcagggacaatgggcggtcccggatagaacagttggccgccgacccgccgcagatggaagccccactggtggcgtggcgtccagccgagaaacgggggcggcatacccaaccgtcccacatgcccgtattcgccgataccgatacggtagccgtgcagccccatagcgacacggccgttggcattgcgggcatggacgaagttcttgggcatataaaagtctttccctacaatgctcgtgaacacgttgtaggctttcttgttggccgagtttgttccccagtccgtcagggccaacatctgacgctcggtaaggtcgtaggtcagcagcggcgaatcgtggccctgcaccacgagccggtagcccgtgccgtcgctgaccacgtgggcctgcataccgttacgcctcaatatgtcctgcatttcgggttgcaggtccatcattcgggggttggtattctttcgtatcgccataatccgttgttaaaaagggtttccgttatgcatctccgttctccatcgccgcctccagttgctcgtccttgtagtggacgaactcggcggcggattcgttgcccgccataaggctgtgctccttgcaatagcgggcatattcctcctgccattcgggcgagaaatgattcacatagtcgagccagccgtattcgccgcgctccatcttctcgataagtacctcttcggaataatattggtgttctgccatattcgctggatgttaagatattatttgtgaactcccgccgcacggttacgctcggcgcttttcttctgttcgttccacagttcttcggtatattcctcttcgggaacatagtcgaggttgccgtcatcgtccatcacccagcagccgtacacgccgaaagtgtacttgtcccactcgcgtttgggctgttctttccatttctggctgtcgcccgaacagaagcggatgccggtcttgtcatgcaggtcgatgcccaccgtgacgggttcatcgtccacgaccagtgtcagcggttcgccgttctgcatactgtttacctccattgtaccgaggtgcattatgtcggccagcacttgcaggttgcgcccgataatcggcgtggggatatacatcacctgcttcgtttcctcgtctatctgcacgaatgccttgctgtgccgtccgtctgccgtctccacatcggcaagaatcgccttgcctgcgagcagttgtttctgttgcgcctcgtcgtagcgttccagtggcgaggattccaggacgggataaaataccacgtccgacagaccgtcatctctacggacaagggcgaagcggctgcggctttcgattagttctcccttctcgtcacggacacggaccggaagcacgggagagtgtctgccgtcgcaaatctcatcgaggacacgcatcggcaagtcctcgatcatctcctgtgtaagcccgaatcgggccagtgtcggatagggcaattcaattagttcaaatcgtactacattcatatttaattttgtattttgaattacactttgcaaagatagattcttttcattcccttgtatataatagaataatattagtgtattaagagagtttatttttatgttcagagtatgattttgcgcataaattcatactctgaatgctttttttgttgtactttggtcgaaaaaggccgtggaaacgggacatcttgggcagggctggttatatttgccgcatgagaaagaaactactggttttgatggcgggtgctgcaagtatcgcaggccccgttcaagcacaattcaatacggtctcgaccgtgccgtcccgatacagggttgaagtcgtttctgccggtagggataatgtggcgaccttgcccggaaacatgctttccgtccaagactccttaccgtcggcaggagacgccgccccggcattgcccgccgacacctgcaaacacgtatggatagagcgttaccttagcgtaagctatccgctgcaccggatgaaaatcaactcgctttatgggtatcggaaagatccttttaccggaaaaaagaagtttcacaacggaatcgacctccacgcacggggcgacgaggtgatggccatgatggcgggagtggtagtgaaagtcgggcaggacaaatcctccggcaagtatgtgaccttacggcatggagactacacggtcagctattgccacctgtcgcgtatccttacccggaaaggggctgctatcgggccgagggatgtcgtcggtattaccggttctacaggacgcagcaccggcgaacacctgcatatttcctgcaagctcgatggaaaaagtgtcgatccgttaatggtactggattacatcaagtccatacgcgaagagtgcgtggcggcactggccgaatccagagaggcccccgcattaagtcctgcgggtggaaaacacagatgattccgtttatttttgttaatcatttcacgggaatggtaaaaaaatgcctttatgcttacctttgcaaggcaaaattaaggtatgaaaggattcgttgctgttctatcgttggtgctgctggccttggtatgcaattccggggcgctgcatgttccggcggccggtgtggcggctgcgcaggaatgttgtgtccgaaatacggacaacgcctcttttcagcaattccatgacagagactctatccggcaaaaaaaggacagcgacataacaggcataatcggggaaatccccgatgtggcttgccgtgccggcgcatcggtaaaggggatgcatcttcggtacatatctgtggaaacggcccattttctccgaattttacagcggtatctcatttgccgcatgaacaacctgacctattgttgtaccctcgtgcatgactcttcccgtagcccgaactgggataatgcctgcgagcattatatcttcgggatgagacggattctgatttagcggtttgtttttttatcgtttatactgacggttacacttggctgaaaagcggggtgtggctgttcgtcgtgagtatatcttattattgaacaatcagcaaaaataaaattttcaatccgtatgaatcaaaacatttctgctgccgaaaccctgttttccgcagcgcatcccgatataaagaagattaccaatatttcggctcttattctttccctccttttttgtgcggtgggactgtgccttctgtttttctcgtcgaaagtggaagattcctcttccgcgtcaggtcctgtcctgctggtcggcggaatcgcctttctggtggccggaggtattcgcctgatgataagaaaaaggagtctgatatacgttccgaccggcagtttggtgaaaaaaggttcttgtttcttcgatgcgggcgacctctctgtattggggcggttgctggaggagaagacttttgacggcaaggcagaggtactgccgaagaaggacggcggtgtgcggatggactacatggtttcgcaggacggtaacttcgctgccgtccagttgctgaagtatgttccttacgcttacgaaccggcatcttccgtactccattatacgggagaagaggccagcgctttcgtgaatgctttgcgggtcggccgattctgattctggaagggaaacggtaacagtttccgcaatttggctcgtccggcagccggttctataaaagaacggttgccggatttgtttttattgtggactggggtttgtttctttggaaggctttcatttgcacgacaaatgtccggttcatacatgacgccatgctctggaaaagacccggttgtacggcaggttttcttgtactctgtatcgttccgaccattttttatatgttgaaggttaaagtaatgagttattatatataccgattgtttggtattggcacggctggtaaaagcttgtaattttgtacccgtttttcatttcttttaaaaactataaaaaaataacgggtaattgtgcgtatatctgttctcggactgatacttatgttcctgtttccgataactctatttgcccaacagagggtggatgtgaccggaaagacccttgtcgtttccaacaatggagaaggacaagaggtgttgccctataccaatatcttggtactcgaagccggggattccacccttgtaaaaggggtgatgagtgatgccggcgggaatttccgtcttagcttccatgcaaagaaagaatcgccttacctgctgaaagtttcttatataggtatgaagccggagtttcgtgcattaaatacaggcaagacgaaaatccatgtcggaaacattgtcttgacagaaggtcttgaactgtccgaagtggtggtcacggctcccataaaggaggtggaactggtgggcgacactaccgtcatcaatgccgatgcctaccggattcccgaaggctcgaacttggaagagctggtaaaaaagataccgggcttggaatatgacaggcaaaacaaaaccttggtttataatgggcttcccattgcggaaatcaatgttaacggggaagcgttctttgcaggaaaccatgcgctggctttggaaaatctgcccgccgatttggtaagcaggataaaagtgtatgacaagcgtagcgaaatggagaaattcatggggataaaaacaggggaagaaaactatgtgctcgacctgcaaaccaagaaggagttcaacggtacactgatgacttccgtagccgcaggcaagggtaacaacaagaaaaaagaagcggaactaatcagcaatttcttcaaaaccggcggggaaaacctgtcggtaatcgccaaaagcggcaaccgcaacatgacatccgcaaacaaagacaaccgccaagacaatgtagcggtgaacttcctgaaaaagttcggaaagaagatacaccttaacgggaatgtcatgtacagcaatgctatcaatgggaacgaggggacatcttactacgagcaatacctgaaaacggggaaccgctaccgctatgcgaccagcgaccgccacaacaccaaccgcatggcaagcaccatgctaagcatgaaatggaatatcgataagatgaccttgctgaacctttcaggcagctttagtgcgatgaaagggacaaacgggagtgacagccggcaggcgacctacaatgaaaatccagaattggatatcacagcaccgttcaatggggaagaaaacggccaaacggaaaacgatatccgggtgaatggcatccgcatgaactcccgttcaacaagcgccaaccggcagtatttcctgaacgccgacctcacccgacggctgaacgagaaaggcagcagtttggggctaaccatgcaatactcggaggggagaggaaagaacgaggcgttttccgtgtcctccaccacctattaccaattgcaggatgagtggggtaacgattccgtcctctaccgtaatcaatattatgacagcccaaacagaaaccgcaaattcagcttgggactgatactgacacagccactacacaagagcctgcgggcacaactttcgtataaattcagacgggaaaaccaaaacaacgaccgcaatacctacgacctgtcccgctttttcgacggtacggacgatgaacccttgtacaccctgccggaaggctacgaggcagcctataccgacagcctgagcaacagaagccgaagccacacgacagcgcatgaagtggccctccaccttaactatacggacagaacttgggaaatcaacgctggcctgtccgtcgttcccgaacggcagagtctcgaccagaagaccgggcggatgcaagccgacacgctgagaacctccgtgaactactacccggctgttaccgtcttgtggcacaaaaagaaaacacgggtgcaactaagttacgagggagacacgaaacagccgggactgaccgaactgctgacactgaccgacaacagcgatccgctgaacattacacggggaaatcccagcctgcgcccttcgtacaaccaaagggtgcgcttagaagcacgagacacgaagataggtttgaacggagacatgacttgggcgaacacggtgaacagtgtgacacgggctgtgacgtacaatacccaaacaggcggtatagaaagctatcccgtgaatgtgaacgggaattggaacgcaagagccaccgtgcgataccagaagcgcatcaaacgccgattttccgttaccgcacgtaccggcgcttcgttcagccagaacgtaagccttatcaacgagggacagcaggagatgccggagcgcagtacgacccacaacacgacactgaatgccaacctgcgttttggctaccagccccaatggggaggtttcgacctgacgggtgactggcgtttccgccactccaccaaccttttgcgcgaaaccggcgattacacccgcgactaccgcttgggggtgaacgcctacgccgacctgcccggcggcattcagttgcggagcgatgtcgattattctttccgcaacgggacgaacatcacccccggcgaagatgaccaggtagtgtggaacgcctccctttcttggcgtttcctcaaacagaagaaggcggaactgtcattctactgggcggacatccttagccagaaaaagaactttacccgcagcgtctcttcctccggattgtcggagagacacacgcagcagataggtagttggttcatgctctccttcaagtaccgttttaacaaacaattataaagcaggagcgaagtttatatttttttagttaatgagtggtgatttgcttctaattatataccaatttttaggtattgtgctctgagtaaactcgttataattttgcaccccgaaataataataacgaaataataaaatcacagaaagatgaaaagaaacaatttgcatgtcggtttgatggcattcgcaatgctgctgataggggcatcgtgcagcgatgacgacaacaccctctcatacagcacgggtgccgtgcagaataccgaattgaaaaccattcttgttcaaagaggctacacattcaacgaggacggcaatctgttgcttgatgatttggctaacaatacgacgacgcttgacctctccggaacgcagatttccacagacgcactggcagaactttccatgttccctaacttgactgatgtggatctgtcggacaatggttacggcccggcgttcgactttgccaaattgccggaacaaatcaccggaatagacctgacgggtaatgaaatctacgactatgataatcttgtgagtgtcgtagtggaagaaaacggtgatgaaactgtgactaacctgcacgaaattaccaaactttaccttccggaaaccgctaaagagaatatcgaagatctcgtgcgtttctaccgccaaaacaaggaagccatcaccgccggcaccattgatatgaagatgactgatgtcgacggcaatctgcaaacttataccaccctgcgcgacgtgcccgacgcaaacctgctcacttatttgcagacaaattttgccgatctgtttaacggcgaccaaatagaccttagcaaacatttgggactcgaccagaaaacaaaggaactgcttgttgctcctgctgataatgttaccaactttgagggtattcagtttctggtggagaatccttattgggaaggtgctaaaatcagcctttattctgccggagaagaaagtatagcttctatgcccaatataaaagtagggaaattcataacccaagtcatcctgcaaaatatagaagtggaagatatcgacttatccaatgctacagatttgcgaagtgcttgggtccaaaataacccggcattgcagaagttagatttgagttattccactatttggggtcaaggagataaagaaacggaaggcaatggtacgtatggcagtagtctgatggttctgggatgtcctatactgaaagaaatcaaattgcccgaaaaaaatgaattgaaagcctacagaattgatattgaatgcttggacgcattggaaacatttgacatgtcgaatgtcaagatggtagcagaactcagtataggtgatttgaataaagactttaatctggtttatccggaactgaccattttctatagtgaagatggatatgccggtacttatttcgcttgttcagagaacactttctatagagaatcaacccaagcattcctgaaagcaaattatacagacattgacccagacgatacggtcagaaggttaggttatacttcttctttatcgtatgataaaaacaaaggatgccgttggaggactttattgaacaaacaaaaataaagtgtaattatttttttattaaactttaattataaaaacgatgcgaaaatttttcttaggagctgcccttgttgcagcaagtttcggaatggcacagtctgctgacgctgccacagtgatggatgtagatggtgtaagtaccgtattggcaatcagcgattacgaaggtacttataacggtacaatggatcaaatcaaaatgagaggagaagattatgagccacgtgctgcatcttatactcttgaaaatggtattttgagttgcgattttccgcagatcggaagtatgccggggaatatcactatcgagttggaagtagaagtagatgaagaaaccggtgaaattacagctttcaaaggtgataaagcaggaactttgaccattttaggcatggatttagtaacattgaagttagattctttgactgatgccaaagttacaggcaacactatcgagtttactctggcagtatccggtaagttcttaggtgcagatttccctgcatccgtacactttgttggaacaaaataattcgtcattattttgtcaagcaacgaaattaaattcagaaagagtaaggagaaagctgtcaaacggctttctcttagctctttttttgtgtgttactaagaaaaaattatcacaatatattcacctcacccaatggggaagacaccattatcctgtcagcaaggctgctatgccgctaaaaacacttccggtatgcaaccgacggcgaggaaacaaaattatccaaaccgcctgaaccgcttctgaagcctacatgcggtacacatcaaagacagactttgccatcggaaaaagcctgcctttaatcatgtaaaaaccatgactttacataccctttgcggaatacacgcaggcaagggtaatgaacaggaaacaattatggattacaaaacaagtaaattatataagcaaaatgaaaaagttatactttttattcagccttcttatggcaacagtaatcggattaagttcgtgtgaaagtgacgattcacttaccaatgagccacctgcacaggaatatattgataaggcgaaggaaatccttgtaggagacctcgtgctctcaacccgtgctacaatgagcggtgtggacaagacgctgttggaaagcggttgccccaccaaattcaacttttcttggcgggaagacggcacgatggtgctcgacctgagcgacttcaccgtgggcgccatgcccttcgccatcaccttccgctgtgcaacgaagtttatgcaactcaacagttgggaaaaggatgaataccccggcagcggttgggtgaagttcgtgggaacggacggaaatgtcaccacgagcggcgatgacgctgcggacaaccaggaagggagcggcgcccgtgtagatggtttcctgaacgtggacaccaagcaagtggagttcatcgtggactacaacatgatgaacgtgcgcaccgaaaccttcctgcaagaaatcgacaagagccgtatcgaccgctttgaagaagaatttgcccagtacgaaaaagacttggaagaagccaagaaagaacagggcaaggcttgacctttcgattgcaggaaagaaggaaagaccgtaagacacacggctttccctcttttttgtgtagaataacatgttttgatgatagacagatgaaaagaataacagccatcttattttgtgtcttactggcatgtatgaatgcccaggcacaacgtaaagtaaagctcaaagttctggagaaagggacggaacagccggtcatcgcggccactgtggtctatgccgataacgaagcgttgcaaaacctgcaggggagcgtcacgaatgtggacgggctggcggaactgaaaatcccctccaagaaaacgtattattacaaaatatcctatgtcggttttgttccggcaacaggaaagatagaagcgaccgaaaccgagaagaccgtctatctggaagaggatcatttgggactgaacgaggtagtcgtcaccggttcgcgtacagcgcgacccatcaagatgtcgcccgttacgacgcaagtcttgggcggcaagcagttggtcgaagccggatacagcaacctgcaacaggcattgcagcaggaaactcccggtctgaatatccagaaggtgggcttcggaaacgaaatctccatgcaggggctcgacgcccgccacgtgctgttcctgatggacggcgagcgcatgacgggcgacatggccgggaatctcgactacgagcgtttcaacctgcacgccatcgaccgtatcgagattgtaaaaggagccagcagtacgctgtacggctcgcgtgccgccggtgcggtaatcaaccttatcacgaagaaaacgaccaaaccgctttccatcgacgcaggtgtgcgctacggacagatgaacgagcgcaattacaagaatccgcaaccgaaggattttttgtatatgttcgagaagaatgccgaccgccccaacctgcaaggctgggtatctgccggattcaaggcggggaaagtaacctcgcagaccgacgcatggtacagttcctcggatgcgttctacatgtatcaggcggagaatgacaagaaggtctacacgcaagaggccaatcccttccttccgcacgacatcaccgtggtcaactcgtcctcacgtccgccgatgggcatcgagggcaaggagcatatcacggtttcccaaaaactgtattacgacccgaccgatgacctctcggtcttggtttacgggagcaccttcttcatgaacacgtatgacctgatacaggacatgactttcagccaggcgcgtgactggacggcgggagccaagctgacctaccacgtgaaggactggttcagcgttacgggtagccttcatgccgacttttacgaccgcttcaagcggcacgagcgcatcgacacgcgcaacaaggactacgagagtagcatctggcagccgcgcctgaccatcacgagcaactacttcgacgggcacagcctgatcttcggtgtggaacatacgtcggacgaactgacctccgaccgtttctccggcaatgccaaccacgatctgaaaacccgcgccttgaaagaaacggagtatttcttgcaggacgagtggaccatcaaccccaagtggatggtatctgccggactgcgtaccaacttctcgaaggcgttcggtttcatggggatgcccaagattgccgccaagtattcgcccaacgaacggtggagcatccgcgccaactattcgatgggataccgttctccgagtatcaaggaactcttcttcaactgggaccatttgggcatgttcatgatccgcggaaacgagaacatgcaaccggaaaagaacaattatttctcgctgggagccgagtacagcaacgaccgcctgttcctgtccggtacggcctacggcaactatttccgtgataaaatcgagggcgtatggcgcatctacgacatgcagtacaacttcgagtacaccaatttgagcaagcaacgccttctggggctggaagccttgctgcgctggcacgtgctggactgcctgacgctgaacgggacgtacagcttcgtgaacgtgagcaagaacgagggcatacaggtgaacaccacctctccccatgccgccacggccagtctggactacaagttcacgaagaagaactaccggttgaacgccgtgttcagcgcctcgtacatgggacgcaagaagttcgacgtgcaggaccgcgtgttcgtggaagaggacaacaagagctatgacgcctacttccgttgcgacctgccgcaatacgtgctgtgcaacctgtcggtgtcgcagaccttctacaataaggtaaaactgacgctcggtgtggacaacatcttcaactacgtgccgaaaaccctcggttcgggcatcacgatgttcaacgtgcccgccacgccgggaacacgcggatgggtgcagttggaatttatgctggacgatgtgattaactctttaaggaaaaagaaatgattaaatatacgacaatgaaacgtatgggattattcaaaacggtaagcctcctgctgggctgtctcacgatgttctcctgcgtggactatgacgacatacagccctttacgggcaagacgctgccccgcaagtcgggctattccacaggggtgacgaacgactggatatacttcaacctccgcacgggagagtcattcaacacttacaccgtgaacaaggacatcaaggaaggcgaacaaatcaaccgcacggactgggatctggctttctgcggctataccatgcgtaccaattcgggtacgagcggcatcggtcagggcggtgccgccgacttgggctatggcggttacgatgactggacgagcgtttcacaactgccttccgacttggaatgggtcgttgacacggacgacgtgcgcgtcaccatgtcgcagaacgactggaaccattaccttgtggaaaacaatctggacttcgatgccaacccgtggttcgaccccaacaacggtcctgccacgaccgagaccaatgccaacccgctgctgtcgcaggccatgagcttctccgggcctccccccacatacaccccttcgttccacacgtatgtggtgcgtaccgccgacggagagaggtacttcaagatacagattatcagttggtacgatgccaacgtggaaatcggtgatgaaggcgggagaatcagttactattgcgacgaattgaaatgacggaaagtatgatgggacaattcgtgcgctttatgcgcttctgcaaccggcggtgggtgaaatggccgacagttatcgtcttcctgacggcgataacggtcgcccacttcgtcatggcagacaagtacggggacagccccaatgctcccacttgggagtttacaattacgctgcacgccgccatgctggttgctgcggcaattattatagtattctacaagaaacgtatcaaacgtaaattaatggaatatggaaaagactaacgtaacgaccactgaaacaacaaatgtaacacctcctgccgccaaacggcgctattggtggaaagccatcgcttctttcctcatggtattgtttaccatgcctttggggcacgggctgatgattatcatggagcatctgatgagcgagaccgttctgcactattcggcctttgtcatgggcgcggtaggtatggcgatggtgattgtcggcgtattcgccaaaggagatacgcgccaaacactctggggattcttcggcggtctgctcttctggacaggctgggtggaatttctcttcatgtattttgccaaccgtttcggcacgcagccggaactcgaccctgtgacgggtgaaatcgtaacccgtcccgaatatctcatactgcccgcctcgttcggtttttggatgatgattatggtaatgtacctgttcagtacaaagaacggatgcaacttcatcaactggtggcaacggttgctcttccgtggtaagaagaacgacatcgccgcccgccccatgacgcgccacacgagtatcgtcacattcatggaactgatgatgttgctgtggacttcctacctgttgctgatgttctgctacgatgatgtattcctgggcgagaatcatccggtgacactgttggtgggggtcggatgctttatcggctcgttctttatcttcgccaaacagttgcgcctttctgcgtggggggccaacatccgtatggcaatcgctaccgttatcgtgttctggacaccgattgagatccttggccgtatggatttgttgagcgagatatgggtagaccctatggggcataagacggaaatgattatcatactggcagcgttccttgtactggctgtttacctgtggtatatgggtgcgaagaaaaagaatgccgtttcccaataaagaaaaccggatatggcagcaacaaaagagagaaaaaggcactggcttaaagcgtttgtctccatcgctgtgacattggttgccatgccgctgacacacatcctggcacgtgcgctgaaagacggtacggcgggggtggaacagttctatgccggtatgggaatggggctgttcggtttgctgatggtcattatcggtgtattcataaaaggcgacgtcaaacaagcgctgttgggtttgttcggcggtatgttttactggatgggcgccatcgacttcctgtttatgtactatgccaaccgtttcggcacgcaggcgcagctcgacccggtaacgggcgagattgtcagccggccggaatacctgatacttccgtccacattcgggttctgggccatgacgatgatgctgtacctgttctgcactgccaacggctgcaatttcctgaactggtggcagcgcttgttcttcggcaagcacaagaaggaaatcgccgcacgccccatgacacgccataccagcattgtcgcttttatggaagtcattaccatgctgtggacgtgctacttggtgctgatgttctgctacgatgagcgtttttttggcgaccatcatccggtgacattgcttgtcgggatgctgggcttcatcggttcgctgttcatgttcgccaagctgttgcgttatgcttcgtggggcatgagcctgcgtttcggtttcgccaccgtaattatcttctggatcgcggtagaggtcttcgaccggattcacctgctgaacgggctatgggcaaatccacaaggacatgtgcaggaaatcgcgttgattctggtttcgtttgcagtaaccgggctttatctcgcttgtgacagacgaaagaaaactgcggatgtaaaacgacaataaaagataaatcatgaaacggataacttggaggaaacatcataaatggttcgggttgctgttctgcttcttcatgctcatgttctgttggagcggtattgtgctgaatcatcgtgaagcggtggccgacatcaacgtcagccggaagtggctgcctgcgggttatcgtttcgaagcatggaacggcgggctgctgaggggaacgctgcgctatacggacaaggattccgtggctcatatactggcctatggtgcagccggggtatggcgcacggacactgccgcctcggcttttgcggacttcaacgaaggactttcccaaggggcggactaccgtagcatgaaaggcatagtgcaaacacccgacggtacgctgtatgccgccggccagttcggcctgtaccgccacgacggaacggcttggatagaaatccccctgcctttggacgagggagaacgtctttcggacatcaccgtccggggcgacacgctggtagttgccggacgttcgtacctctatctctccacgtcttctcacgccggatttcggaaaatacaggtgaaagttcccgacggttacgagccgaaggtgacgcttttccgcacggtgtggatgttgcatagcggggagttgttcggcacggcaggcaagctggttgtggatgcggtggctgttgtgctggttctcctgtgcctcacggggcttgcctactggctgctgcccaaggacatgcgccgccgccaccgccacgggcggcacacggaaggcgaagcccgatggacacgcctctccctgctgtggcacgacaagctgggacgcaccactatcatactgaccctcttggtggccgttacgggctggtgtctccgtccacccgtcatgataccgttggctctgactaagacacccgctctgcccggcacatccttagacagccctaatccttggcacgacaagctgcgcatggtgcgctatgacgatatgtgcggtgactggctgctctccacttccgaaggtttttattcgctggcttcaccggatgccgttcccgtgaaggtggaggaagctcccccggtcagtgtcatggggctgaatgtctggcaaaaggataagcaggggaactggctggccggttcgttcagcggcctgttcgtttgggacagacagcagggctgggtaacggactacttcacgggagaagaagccgaagatacagccggtcctcctttcggcaagtttgccgtttcgggttacagtgcggatttcaagggaaaggaatgcgtggtggaatattacgagggaacggatgcacttgcccagcccggcgaactctccacacaacccatgtcgctttggaacttcgctttggaagtacacagcggacgggtgttcataggcagcgtggctacttacgtgtttgtcttcctcgtgggaggaggatgcgtatggtgtctgtggacaggatatagggtgagaaaaggaaacaagtaatgaaacttgtttttaagaaagtctcttggagattgagcacacccggttctacacaaaatgcgatggcatacggcagaacgccctgtttattttcatgcaggaccggagagataaaacggcatttgaaagaaacggattgccagttgaaaatttgggaggctttgttcaagattccattggttggaatgaccgcatacggagacatcgcctctttgcgcataaaaagtgaggttgtgccggtttgaagtgaacaacctcactttttataatttggggcagcgattgtttaacatcctccgcaacatccgcctcttctgtgtttcttgtgatgacgatgataatcgcagcaacgaccttcatgatcacaatctacgcaacttctgcattcttcattcttgcgacaacctctgcattccgagcagtccgtatcgcatttacacttgcggcaggtacagtcctcgcaacaacattctattttcactgtttccttttcttttttgtccttttgtgcaaacagggtcacacagcaggctgaaaaaacgaggacacaagtcaatacgattttcttcataaattataatgttttaatgtaatgactaaaaatacttgtccctattattcttggtttttcgggaaaattaaaattacgtttccaaaaatagagatataattcaataatcacaaatcacttataataaatgatgtgaaaaatgagattccattcaaaatatgaattaagagaaatctttccgcaagtacaccatgtcggtaagcagctttccatcctcataaatcggatgatcgtaattatccgtgaagaaatttttcagtcggtgtgagatacgaaagccgcaatgttcgtagaaagagagtgtagatggcgtatctcccgtaccgacaagcatgacggaacatctgccctgatagtatccaaagagataatcaaccagccgttttccgtatcctttgcgttgggaggagggacaaacggctatgttttttatttcgtaaataccctctccttcacacgtcactacagagatagccttcagaccgtcatcatagagggcaaacatctcacctcgttccagatatttgtctatcatgctttcttgttcatctgccaacaacagcaaatccaagaattgtttcttgttagaagtaataagttttatttccatgtcatatattctttttccaatgttccaaaaccgtttccaagtgttcaagtcccctttctaccaccccttgataaaaaggataaggctttttcccgatgatgttcaaacgaatttcaacaatagtcattctttcatttcgtcagttccttgattttgttcacgatgcagccaccccacacgtgcgcctttatcagaagcagaggcggccgggtaacggtttttccatagaagatggccgccaccaccttgccgccgcacctttctatctcctccttgtagtcggccatactctgtccgcttgtcagcacgtcgtccacgatgataatctgtttcccttcgatattccccgtgatacggtagttcctttcgaggatacggttttcgccgcctttcgcctcgtgcaagctgtcgcgtgactcgaacacatcgacatcatataagcccgaacttaggtccggccggtgggttgtgatgtaccagtcgagccgtttgaatcgccgggcatacttgaactcgtcgctgcacggcataaacaggatgtggtaaggggcatcggccaaattcaagacggacatgcacgccttaaaaaactcgataccgtgattttcgccctctttgaactggtagagggaacagcagaacgcccgctgttcatcgtcgatcaggtcggcgtaccgtgaaggatagtaatacccatagaaagcgacttttattccgtgcgatttgaacggcttgagcggctgatggtcctcgaaaaagtccgaacgggcgaaacagaacatgaggcaggcttcccgatggcccgccagtaccgccagacggcaataacggtcgcgctctttggcggtagcggctgctcgtgctgctgcgaacgcagcagctgcagtcttccgtcgccagaaaccggcaagatacgacagcaggactgcaaggccgcacaaaaccatgaaccagagctttgcttccatattcattgggataaggttattccgacatacctgtacaaccggcagttttctctgccacgggagctttgcacctgccgttcacctgtttcaatgtcttctcgaaatatcttgttttcatgtatttatgcaatttattactgtgtaatatataagcaaaggaatgaattacattttgtctgctgacattcctaatattttttccatattgggacgaaagaaattgccccactcttccagtttctcaatgataggcaaaagggtttcacctatcggagtaatcgagtattcggaatgtgggggaagttccgcaaatattttcttctctatgattccatacatttccaatttctttaattgctgatttataacacgagcattggcttcaggaaacaatttgtgtaatttgctcggacatttagccccatcgcttagctcaaaaatgatacaacttttccatgtcccactaataacttccattgcaattctgattccgtaatcaatgtcaaaaggtattttcgatacccgattctaatttatattccacctcccagtgcatgataaagtttgataatactctgtatgcggtcaaagctggtttgcaaccggtttgtctctgcttcaaggagtgactgttgggtagttaatatttccagataggtggtaccggaatggcgcatcaacagttccgtctttcgcacagcttcacgcaaggtttcaacctgatgggtgtttatttcaaattgcgattttgccgtctgccatgcggttaaggcatcattcacctctttccccgcgttcagtaatgactgttggtataacaatctggcttcttcctgacgggtttgagcaattttcaaattagcgatatttgttccacggttgaataacggctgtgtcagcgaagcgattgcattgaacagccactgtccgggattggtgattaccccgcctccattgttggtccagcccaatgtacccgaaagagtgatattggggtagaaggccgagcgggctacattggtggcgtagaacgcttgagccagttccatttcagcccgacgaacatcaggacgattggataataacagcaaaggaactccgacagagattgtatcggggaaagacgcttctgccaaatcgctccgctcaatcgagtgcgacggcatggcaagtatcgccgacaaggcgttttctgtctcagagatacttttgcatatagcctgttgcgatgattccagctgcatcacgtttgcccttgcctgcaacacaccggcatcattcgccttgcccacctttttcaacgcttcaagtgtgcgcacggtagcctgccagttttccaaagtccgatgatttatcaccttttgcgcatcaagcagggcgagggtatagtaactgtccgctatcgtagcgacaagctgtgtctgtacggcctgccggtagtcacgacttccttgcaatgcggcaaccgcaccacgctttgctgccgtaagtttgccgaataattcaagctcccaacttgcggacgctcccacattgtacgcctttgccgtagctccgtcatatttgtttccactgccttccgcactgattcccaatgaagggaggtacgacagtctggctgtcatcagggcggcttctgccgcttccactcgcaggcgtgccacattgaggtcggtattctgccggagtcctgtctcaatcaaaaactgaagtttacggtcggtaaacatctcccgccatgacatggatgcaagcgttgttgtatcaatgccagccgggatgttccggtacagcttctctgtcggaatgtcagcccgatgataccggctgtatgtgccacagccggtaagcatcaaggttgatatggtaaataagatgatcttcttcatttaattacgtttaatccgttcttgaatatattgaaatgtgatgaacagtgacggtacgaggaacagcagtgccagcgtacctactatcatacctccgattacgcccgtggcgagcgagcggctgccgttggcacccacaccatgagccatcatcagcggaacgagtccgaacaccatagacaatacggtcatcaggatggggcgcaggcgaacctttgccgcactgtatgccgcctgcgcgagggtcatgccttccgaccgccgcttgccggcatattcggtcagcagaatggctgtcttggcaagcagcccgataatcataatcagtccggtctgcatgtagatgttgttctccagcccgaacagtcccgcgaacaggaagctgcccatcaaaccgcaaggcacggacagcaacacggcaaacgggatgaacacgctttcatagagggcacacagtatgaggtatatcaagaccatgcacagcacgaatatccacacggcattgttcgtcgtattgctttcttcgcgcgacaaccctcccaactcgtaggtgtaacctgacgggagaacgtggtcggcagtttcccttatggccttcaatacctgtcccgaactgtatcctgttgccggcgacccgctgatggaaatggcattgaacatattgaagcgggtcaggtccgacggaccgttggtcttggtaagacggacaaaatggctcaacggcgacatggagccgtcggaagtacggacatacatgccgtccaacgattcggtgtccatgcgatattcggcaggagcctgcatggtgacatggtacagttttgagaagcggttgaaattcgatacatattctcccgaaaaatatcccgagagtgttgacaggacatcggaaggagacacaccggactgttcgcatttggcagcatctatatccacccagtattgcggataatcagccgcgaacgatgaatagacctcaccgatctccggtctgcccgacaacgcttccacaaaccggtcggtcacttggctgaaggcggttatgtctccggcgtttttgtcctgcaagtacagttcaaaaccgttgcccatcccatatccggcaatcatcgggggcgacatggcgaatacggtggcatcgggaatatcggcggtggcggcataaatacggcctattacatcgttcaccgactgcccttcccctttgcgctcgtcccaatccgtgagagtgagaaaagacatggcctgcgaaggtcccgagccactgaaagaaaagcctgccacagtaccgttgtattcaatctctgcgatactgtcaagacggctgtttatacgttttagggttttgccggtctgcgccatggatgtaccgggtttcgtgttcatgctgaccatgaccgtgcctgtatcttcttcaggaataagtccggtcttggtcgtattgacaaaaagcaccaacagcccgaacgataccgcgatagtgccccacagcagccacctgcgatgaatgacatatagcacaccgcgcacataacgacggctcaaacggtcaaaaaccgcattgaatgccttgcggaagcgtgccgcgaagttgttcttcgtgttcccgtgctcgtcaatgtaaggcttcagcagcagggcgcacaatgccggagaaagggtgaaggcattgatggccgaaatgcccacggcaaccgccatcgtgataccgaactgcgtatagaacgcccctgaagtaccgcccatcatgcccacagggaagaacaccgccatgaaaataagggtggaggtcagaatggccgacgacacgcccttcatggcatcatcggcggcaagcaccggagactgatacccctcgtcgaacttcgcctgcacggcttccaccaccacgatggcatcgtccaccaccgtgcctatggcaagcacaagggcgaaaagcgtaagcaggttgatggaaaagcctatcagtgacattacggcaaacgttccgatgatggacacgaagatagaaatcgtgggaatcagcgtggacttgatgtcctgtaagaacacatacaccaccacgatgactaaaagtatcgcctcgataagcgtcctgatgacagaatggatggaggcattcaggaacttgttggtgtcggtaagcaccacaaactctgccccttcgggcaaatcgcggctgaggtcatcgagtacctcgtgtatctcattgatggtgcttgatgcgttcgaaccggatttctggtttatcatcatcatggctgccggatgtccgttcacttcggatgaataattgtaatactcatcgcccagctctatatccgcgacctctttcaatcgcaatacatcgccgccgggcagggacttgaccaccagttcgccgaactcttccgcagtcgagagcctgccccggtatttcatcgtgtactcgtttgccccgtcggagttctgtccgaaagaaccggtggcggcctcaatgttctgccgtgccaataccgccgaaatatcatccgggataagcccgtaccccgccatcttgtccggtttgagccacaaacgcatactgtagttcgagccgaacagctgtgcctttccgacaccgcctatacgtttcacccgtggctcgacattgattttcatgtaattgttcaggaaagtctggtcgaaacggtcgtcgggtgagtaaagcgcgaaagtcatcagctcggcattctgctgtttctctgtcgtgacgccgcttttggtggcttccgccggaagctggcttaacgcgccattcacacggttctgcacgttcaccgccgccatgtccgcgttggcaccctgcttgaaatagatgttgatggaagcatcgcccgtgttggatgcggtagaggtcatgtagatcatgtcctccactccgttaatggcttcctcaagcgggacgattaccgctttctgcacggtttcggcattcgcaccgggataggtacagaacacgttgacagtaggcggtgcaatgtcgggatattgctccaccgggagcactttgatggcgatgagtcccatcaagacaatcaccacggaaataacgcccgagaataccgggcggtctatgaaaaatcgtagattcatggggttacgtttttaggtgtaacaatcattccttcctttacaagtcctaccccttcggtgatgatggtgtcgcccacggacacaccttgcttcaccacgaagtggttaccatcgttcagacggtccacggtcaggtaggctgcttcggcctttccgtttctgaggcggtaggcgataatcttgtcctgcaattccacggtggcggtcttgggcagcaggatggcatccgcatccactccttgcaggacgatattgccgatggtgccgctcagcagctcacggtcggggttggggaagcgggctttgatttgcaccgccccggtggtggcattgaccacgccactgacagtctctatgcgtcccttccgtccgtagaacgtgccgtcattcagttgcaggccgacttccggcatttgggaaatcatcttgtctatggaaccgtattgtgtcctgaactgacgcagcttgttttcggagacggagaaataggcgtacatttccgcattgtcggaaactaccgtgaagggctgcgtcatgccgggactgacaagtgcgccgatgcggaaaggaagcgtgcctaccactccgttgctgggactttttatctcggtataggagagattgttgcgggcatccgtttcctgagcctttgcctgttcgagttcggcaagtgctaccgccagcccgttgcgggcaagagagagttcgtaatcggatatgactttctcatcaaacaaggcttgcttgccttgcagctcgatccgtgccgtttccacttttgcctgtgctgcgctgacgtttgcctgtgcggtgcgcaaggctgcctgatagggcacttggtcgatgacggcaagcacttgtcccgtcttaacctgctccccttctttcacacacaggcgggtgatacggcccgacacttggggtactatgtccacatcctgccgcccacggatggaggcggaataactttcttgaaattcaactgcccgggaagaaaccaccatgacgggcaatgtctgtctcatttcctgttccctctgttcttgtttgcaggctgtcaataatgcagccagcaggcttgttaccgtgatgccggctatccatgttcttctattcatcatctgttcttattgtttttccattccttattcaataccgcataaatgcaggtgtcctcataccgtggtgttccatcgggatggcacacaaacgatatgaattccttcatgcatccttcatatctcattccgagacgttcgcacaatcttttcgaccgcaggttgtcatcctccacaaagccgtagatgcgacgtgcgcctgcttcacggaaaaggtaatccagaaattccgttgccgcttcatgcgccaatcccttgccctcgaagcgttggttgaaatgccagcccacgttgaatgtgtcggcttcttcacgcaatgcaaaaacatcaccgattatgaaatcgtcttccttcaggcacacggcatagcgcagcaactcctttggagtattggatatataagccagtgcagactcttcagagcacaagcgttcgctcacgaagcagttgacacgcggatgggagaggtattccagcaaaccaacggcatccttctcctgaaaatctctgatgataaggtgttctgtttcaataatcataagtcgccaattttggctgcaaagatattccatacccaatttgccgacaaccggcatgcagtcgaaacggaaaaaaacatttataaaacagctaaaatggcttctgaaatgtcattgtaaatgctcttttcaaagatgcacatctttgggcagttaagccatgcttcttgatgcgtcaccttcctacagattaccaaaatcataccctgttttggcaatctacgttcattatgcaagcatcgaatacagtataaatgatagaaccatctgtctcgacactccttttatctgtttcaactgctgttttgtctgtttcatccggtttcgacctatcaaatgaaaaagcaaagtcgtacctttgcaacatgaagtaactttgcaaccaaatatgatcaaagaaaatgtaaaaataatgaactggcggaacggcttcctgctatcgctcgtttcctatatcctctaccttattatatggttaattcttgatgacgaaaccgccaaccaattaccgggaatggcgacagtcgattatgtcgtcgattttttgttgtgtatgctctttacctacatatccttggggttctcttaccttgtttttaagattttgccgttcagaacatcttatgtgtgggtgattgtctatgcttcctgtcttttgacgctgaataacctcgttacgttcggcatgacatctctgttcaatcttttgtgggatgaaaccggcaacgggcttcttgacgaactgatcaacatgaagggggcttacacttttgccatgatagccactttcatatcaagcgtttatgccaacacattctacctccagtcatacatcagggcgcgcgatgagaagcaggctcttgaaatggcactgatgaaggagaaggagattgccttacagtcgcaactcaactcgctgaagctgcaaattaatccgcacttcatgttcaacaacttcaacaacctgctggaattgatagaggaagataccaaacttgccggcaagttcctgagtaacctgtcgaaagtgtaccggtacatcatcaccaatctggaccggaatctgattcccgtcagagatgagataaagttccttgaatcatacttgtatctgatgcaggtgcgccacgtcggaggggtcgtcacgaacatcagcctcgaactgaaagaatgcaaaggataccttcccccggccgtgttgcaacttcttgtggagaatgcaataaagcataacggtttttcgatggaaaatccgttgtttattgacatcacgttgtctgacgactatatcacagtgcgcaaccttaaatctcccttgctctcaaaaatggaatcgaccggcttgggtcataaaaacataatagagcgttattcgttgctctgcgataaaaaagtcaagatagaaaatgccgagaacttctattcggtgagtttgcccatcataaaaaaacagtccctatgaagatactgattcttgaagacgaacagcgcaatgccatgcgtctcattagattgctgaacgacattgatacgacgtttataattgaaggaccacttacaaatatcaaagaggcggtcgattttttccaatcaggcaaaacaacagacctcatccttgcggatatccgccttactgacggcctgagttttgaagcgcttaaatatgctccggcaaccgttccaatcatattcaccaccgcatacgatgaatatgcggtacaggctttcaagttcaatagctttgactatcttctgaagcctttggatgccgatgaacttgaagctgccatagataaagctaccaaagctggcaagaattatgctgacgaaaatctccggcagcttttcgattcgttgcagaagaaccagttccgctatcgggaacgtttcctgttgccctatcgtgacgggtataagaccgtacgtgtttcggacatcaaccatatcgaaaccgaaaacaagacggtataccttcgtcttaataatggaacttcagaagttgtcaatatgtcaatggacgaactcgaacagcaactcaatcctgattgcttcttccgtgccaaccgccaatacataattaacatagaatacgtattgtttctttctaattatttcggagggaaacttattgtccgcttaaaagggtatccgaacacaaaaataaccgttagtaaagagaaggctcaacggctaaaagagtggattgacaaatagtctctgccatgctatgataacatttctgtactcactttcagttagaaaaaactgaatatctcgctactccatgaggaacgcgcggatattctttataatcgcttgttccagttcgtattcggaatgttctttcgaaaggcccacaaggtcgaatgtatattcgtctttcagggcaagtatggcctggttctttatcttctccggcaaggtcatgtcgaagttgctctgaccgagcagataattttcgtaggtctttgcttctatcttgttgataagtacatctttcgtccagccgtatttcttggttgacaagatgtagaattgccgttgttgcatctctttgcacttggtcagaatgacgatgtgcttcgaccagctaatttctccaactaacggttggagaatttcattcgaccggtattcggtataaaaacgggccatgtcccacatgttggaaacaccgaatccctttatacccagaaactccttttgtatgtaccgcgaaaggttctccatgacggattttccccagcccaaggccgcttgttgttcggtaatccgcctgccgatttcccaatacagggcgatcatctctttgtttacggccttcaatgcctcgtattggggcgaccggatgcgggaggttatctcgtttctgaaatcgagatattcgggagataagatgggagtattcttttcagtcataggttattcattataatcggttacaggggtaagtttttcttttgattatgcacaggattcccttgtcttatcccatcttctccggatttccggtctgtcggcagcattccccgttgtacgacgctttctcccttttctatacccgttccgtcctttctcccttgtacgcattttcctccctcttttagctgtcggtttccgtgcccagccttgcagcgacctgcggggtattatttttccgcgaaggtaacgggccgttccaatcttgccaatgccggctgcgccgcgagtgaggcgcaaaaatcttcctctccgttgtcgagcgtattttttcgcttcagccttgtccgattgtccctgccaccttcaagaggcagaaaaataatcccggaggccgcaaacaggccgaataaagggaaacaaacaaggttaaattatgagttacagcaaattaaaatcactggtggcaaacgtggaagccattgcaacggcaatgaaagtccgtatcgacgaccgacaagccactgacgaagagaaagaggtattatcccgatattccggtttcggggggattaaagatgtattgaatataggaacggagcataccgtcagcgatgatgtggccgagcctatccgcaagctgcaggacttgataggcgcatatccctattatgacgacgccatgcggcaagccgtcatcaacagtataaaatcctccgtcctgactgctttttacacaccgaaattcctcgtggacgcagtaacccggcagatacacgctacattcaaggataactgcctgcaaatgagtacctttcttgaacccagtgcgggaattggcggctttctgcccgtctccatgcccggcactcgcagctacgcttttgaaaaagattgtcttacggggcttatcctgtcgcttctgtatgacgaggcgaccacggtaacggcaggcttcgagacgatagccgaccagcatctggagcatgagagcttcgatgttatcgcctcgaatatcccgttcggcaatttccgggtgttcgatgcggaaatgtggaagaaaggcggcatgtacgaacagtcagccaagaccatacacaactacttttttgtcaaggcaatggaactgttgaacgagggcggactgctggcgttcgttgcgccgagaggaattgccgacacgccgggcaacaagttcgtgcgcgagtacctcgtcaatcatgccgacctcataacggccttacggctacccgatacccttttcatgcagacgagcggcatagaggtagggagcgaccttttgatattccaaaagcacagccgcaaggcgacgctctcgttacgggagaagatgtttttgcaggtctccaaggaaaaggtcgacacggcaggaacgatgaccgactatgcgaacaaaatctttaccctccccaagaccgcccttgccacggacagtcgcattgcgctgaaccagttcggtaagtacgtccgcaaataccagtggttaggcgatggaaacgccatgtcccaatacctttccgcactgctcaaatacgatttcgaccgctattttcgcaaggctctttttgccaatcacggccaggacaacacccccgtgcagatgtctcttttcggcgagccgcagacggtcaaaggcatacgtgcctacacggaggacatggaaacatggatgaagaacggcgcaatggtcgttttcgaggggcaggtaggtacgcttcggtttcgtaagtcgagccgttacacggagacagccgttgatttcgtacccgtggacgagggcaaggtaaatacggacagggccgccgactatttccccatacgcaaggtgtatttcgagctgtccggcagggaacgggaagaacaaaaggagtgctcggaactgcgtaaacaactcaacaccctatacgacgcttttattgccaaatggggatttttccacgacaacgacaacaaggagtttatcttgctcgacagcctcggtacggaggtgttcacgatagaaatgcaggtcggcagggacatcttcaaagccgacgttatgcgtgaacctgtagctttcaagaagatagacaccgccgtaacgctgtcccccgtggaagccttggcaagcagcctgaacttttacggcaaggtcgatatgggctacatggcacaagccacgaacaaggaggaagaagaaatcatcgaagccctgcaaggggaaattttctacaatccggccaatggggaatgggagcacaaaggaaagttcctctccggaaacatcatcgccaagcaggaagagacgctttcctttctcccgaatctcgcaggcaaggagaaagaatgggccgaagcgtccgcaaaggcactggagaacaccatacccgaaccgataccctatgaagaactcgacatcaacatgggcgagcggtggatagatacgaagctgtacgccgatttcgcctccgacctattcggagtgggtgcggacgtgatgtatttcgacgtgaacgatacctacttgattcggctgcagggatattcgcccgtggcatacaatacctattccgtgcgcaattacaacggcgaggacttgtttgtacacgccctgcacgataccgtacctgagataacgaaagaggaataccggaacggcagcaaaatacgtgtgccggacgaggaagccatgcaggaggccgccgccaagatacaggaaattagagaccgtttcaaccggtggcttgacgatgagcctttggaagtccgggacgaactggtaaggacatacaacgagcgcttcaattgttacgtgcgtccgcactacgacggctcggcgcagacgttccccggcctctctttcgagctgttcccgtacaaagaactttatccctcacagaaagacgctatctggatgattaagcagaacggcggcggtatctgctggcacgaggtcggcacgggcaagacgatgattatgtgcgtggccgcatacgaaatgaaacgtctcggactggtgcagaaacccctcattatcgggctgaaagccaatgtacacgagattgccgatacattccgaaaggcataccccacggccaaggtgctctatccgggcaaggaagatttcacccccgccaaccgcaaggaagtgttttcaaaaatcaagaacaacaactgggattgcattatcctgacacacgaccagtttagcaagattccgcaatccgaagaaaccatgtacgacatattctcggaagaactggccgatgtggagcgcagcctcgaagtgctggagcaatccactatgcgttaccggagcggcaggatgcagaaaggactggaaacccggaaacagaaccttgaagccaagctcgccgaactgcagatgaagatagacctccggaaagacgataccatcgatttccgttcgatgggcatagaccacatttttgtagacgaatgccactgctataaaaatttgatgttccagacacgccacacgagagtagcgggcatcggcaatgcgcaaggctcgcaaagggcgatgaaccttttgtttgccattcgggacattcaacgccgcacgggaaaggacttgggggctacgttcctgtcgggtacggtggtcgtcaatgcgctgaccgaactgtacgtgatgttcaaatatctgcgtccaagggaactcaaacggcaacaagtaagctgtttcgacgcttgggcggctatcttcacgaaaaaggccgccgactacgagctgaacgtaacgggtacgataaagcgcaaagagcgtttccgcacttacatcaaagtgccggaactggcgatgttcctgcgggagattaccgactatcgtacagccgatatgataaacctcgatgtgccggacaaaaacgtgcgtttcctttcccatgcacccactatccaacaggaggaaatgatcgggcggctcgtcgcctttgcgcacagcggacaatgggaagatttggggttggatattccgcagccggacaatctcgacaaggcaaaaatgcttgttgctaccaacgtggcccgtaagatgtctcttgatatgcgtctgttgggcgataagtttactgatgacccgaacaacaaggcttcgatttgcgcaagaactatttatgattattatgtaagttcaaatgccaatcgtggtacacagttcgtcttcagcgaccttgccacttacaagccgaacgagtggaacatctatagcgacatcaaggacaagctggtggcaatggggattcctgccgatgaaatccagtttatccagtacgccaagaccgaacgggcgagaaagaaactttttgcggacatgaacagtggcagggtacgggtgttgttcggctctacctcgatgttgggaacgggagtaaacgcccaagaaagggccgttgcggtgcatcatctggagataccttgggtgcgacatgaagtcgcatagataattgttggaatgatacttacgggtatcagctttaacccgctgttccgtcagcggtagcctaccaccgatgcaccttaatagttgtattaagcggttgggacaaagtacactttcgcaagacaagacagaaccgtgaggggaagtcaagtacggttagtatcataccgtagagtggcgaggcaggatagtatggttagcgcaagcgaactgttagtaaacttcgtaatgtcacgaaagagtgtaagatactggtacactctacccaaaagggaagcggtcggttaatcctttccatggtaggattacacggatataagcaccgccggaggatgagacagaacctaacctatccgttagttatctatgtggaacatggtaagcctgtatatctcctgccatgtaaaaatggcaggtaagctgacagcaatgaaagccgaatggtgtgcaggtataagataacagaaaaagcgaatgccgttctgtaatggaacggatacggattgaaccgacatcacgggctgatgtaggcgacatcatccgacacgaaagtgggcagacttctgtggcgacactcggtaggcaaaacaaaccgaatgttgccaaatggtgattctttacaatagacttttagaacttttttaaagtaggaatgcaaatgaacgataaaatcaaagaaaaactcctcgaccaatcgtgtgcaccgactgataacttgcaaacgaattgggacaggatagactggaccaaagcggagcaggctgttaagaagcttcaagctcgcattgtaaaggctcagaaggaaggcagaacgggcaaggtgaaagccttgcagtggacgctgacccactctttttacgcaaaagccttagccgtaaagagagttacttctaacggaggtggtagcacccccggggtggacatggaaacatgggagaaacccgaagcaaaaacacaagcgataagtgagctcaaacgcagaggctacctgccgaagccattgagaagagtccacatcaaaaagagtaatggcaaactgcgaccgttgggaataccgacaatgaaagacagagccatgcaagcactttacctcatggcattggaaccagtgtcggaaacaacagccgacacacgttcgtacggtttccgcaaggaacgtcgctgtatggatgcggtacagcaatgtcataacattctccggaaaggctattctcccgaatggattttggagggtgacataaaggggtgcttcgaccatatcagccatgaatggttgcttgccaacatccctatggacaaagcaatactccgaaaatggttgaaatgcggctatatcttcaacaaacagatgttcccgacagaggagggaacgccacaaggtggcattatctctcccacgcttgccaatatgacattggacggattgcagaaagtccttgcagagaaatataaacgagttagaataaaaggcaagttatattcgccaatggtgaatcttgtccgctatgctgatgactttataattacctgcgagaaccgtgaaacacttgaaaaagaaatcaagccattggtagccgactttatgtctgaaagaggtttgaccttatccgaagaaaagacggtgataaccaacattcgtgacggtttcgatttcctcggtttcaatattcgcaaatacggcaatgaaatattgacaaagccgaccaagaaagccgaaaaacgctttatggaaaatatccgtaaggttacaaaaggtcataagggttgcaagcaggaatcattaatcagaatgttgaatgctaaaatccgaggatggggagcatattatcagcatggggcgacacgtgattcttttcacagaatcgaccatcagatatttctcgccttgtggcaatgggctaaacgccgccattccaagaaaggaaaacggtggataaaagaccgttattggcacaatatccgagggaacagctggacttttgcggctaagttcaagaaatcaaacggcaaggaagaccaactcactttgctgaaactggcatcttcgtttcctttcctgcaatatacgcagataaaaggggatatgaatccgtttgacgcagactgccgcctgtacttcaataaaagaatgaagtcaaagatgcttgtgacactgaaaggacgtaagtccctgctttacctatgggaaaagcaagggcggaaatgtccgatatgtggtgaaccgattgacacgtataaggcatggaacgtaatgccaaccgtccaagacggacggaaatgcaatctgttggttcatgatgaatgtttcaaattatcccgtaaaaacaatggaaacaagaagtaggatgagccggtctctgcacacgaacagagactttgaaaagcttgagccgtatgaggggaaaccctcacgtacggttctgaggggggaagagggcagtaatgcccttgacctacccgatcgccccgccgacatggagcagcgcaacggtcgtgcggtacgcaaaggcaacaccgttaagctctggggaaacaataccgtggacgtggtgatttacggaacggaaaagacgctcgacgcttacaaatttaacctgttgaaaaccaagcaaatgttcatcaaccaaattaacaacggtacgattgctgtgcgccgtatcgacgaggacgctatggacgaggataacggcatgaatttcgccgagttcgtggctctcctgtcgggaaataccgacctgttggagaaaacgaagctcgacaataagattatgcagctcgaaaaggaacaggccattttcaagaaagaccgtatcagggccgagcgtaagattgcggccaaccgggaagacatgacaaaggccgagagtgcggcggcacgcatgacgcaggactgggaatatatcacctcttacaccggagaccggacgacccggctgttgaacctcgcacaagccacggcggaagagaccggacgggagctgcaccgcatttccaagacctaccgcaacggggcaatcggtacgataggcacgtatgccggattgaacctgtcggtgtacagcgagtatgacatgggcggtacattctaccgcaacacgttcctcgtcgagggcgtaagcggactgaaataccgttgtggcatatcgggagcattgcctctgggcttcgtggaatcctcccgatacccgcaagccgccctcgccaagctgcccggcatgattgaggaacaacggcagaagatagccaagctggagagcgagatacccgctttgcagggaatcatcgcccgcaagtggagcaaggcggacgagttggcaaggctcaaacaggagtgcaacgctttacagcatcggatcgacgaaagcatgaaagaggcggaacgcacgcagtccgccctttccgaacacgaggccaccgacaaagcggcatgaccataattcatagatttaaccttttccctctgttcggttacaacaccggacaggggattttttcaccttccggtctgccacggccatacccggttgtaacggaatcttccccttgtacctccagccactccttttataccacacaccttgtcttttataggcaggctttcgcttcccccccctttgtagattgagatgctatcacgaaccgacgaccgtaaagcccgacacttttttccgcaaagttgattgcatctcaaaactttgcctcaaggcccatcttcgattttcctgatgaaaaatcttccttctcattccattccaagagtatttttcatggaatccttgctgcaaaccccgtgatgcaaagacgaggcagaaaaaagaatcgaactttccggtaatcgctcgaaccggagggaaataaaaaaaacttaaaaacaaattgaaacatgaaaaaaaattcgctttttgacaactggttcgtttacaactatcagagattgcgtaacatattcggacgttacctgcacgaggacgcctttcacgacgcctatttggcgatgaaacgggaagtcgtgatttcggaaatacctgtcgagagcttcgagccttattttttcggcgtgtacaaaaagtgcagactgaaatgtattcacaaggatagttgttactgtttccccgacaacgaacatttctttttgctcatgcaggaagaagaaacaccgtccgtcgaggtgctggcagcttccgacaagctggtgtatgacatactgctgtttgtgaagaagaaatatccccaaacggactacgagcttttcagactgaaagagtacgaggcgaaatgttcatacagacacctttccgcctatgcaggcatttccgcaagtgcgatacaccggagaataagcgatataaccgacactatccgcaatcacgaaggattttccaaaaggtacgcccacgtaagcatgtaatttgtataacccgtaaataattcaagaaaatgaaatttgtaatttacaacgtcgagaattgccggacaagagaaaaccgtgtaggtaaaagaagcataaggttcaacagcgttaccggcaacatgtatctatccaccaaattggcaaaagaaatgaatatcacaatgaacgaccgactggagtttggctgtgatgaaaacaacccgaaagagtggtttctgcacaaaaccactgacaagcgaggttttccgctgcagttcaacaggggaggaacacgtttgaggaataagtacatctgtaagaccattttggatatagcgaaggtcaaggagagcgcaacattcttggtatcgaaagacccggtaaagaccgagctggggccattttacagaataatactttcttgccccattctcccgaagaacaagcccaaactataagccgataacctctgtggtctgtccgatgggcgaaagccctccggacggattgcggggcaaccgataccttttatagtacgattactccttttttaccttcaggctgtttccctattatacgccggctttcccaaccccgtgaaccagtggaaagtctgtgccgtaacaagtcgtcagggaaaggtacgggaggccgttcaaaaccggcggcagcccggatcgtgccgttccatgccggagcttcgacctgtcgaaacaacacggtattccacagcccgaccggtctttatgccgctggtttcggactttccgcctctgttccgtatctttcccttgtgacctgccacgtcaagggcaaacggtgatacttcttattcgctccgcgctttcattccgcccggtcgaaattcaggcgtggagcggataaggagaatccctttcatgtttgccccggcagacccttgccggacccgcccaagccggacccttttctacttcgcttcccctgcatttatacaggcaaagccgtactccctttttaccatcatatttaccggtctgttccggtctcctctctgccggtgtcgtccggtttgccagatgcaaaggtcggctgccatgcttgatccggcggcttgaagtgcattccccgcaaattcttcctttccatgaaagcgtaattggccgggaaacccgccgtatgaagccctgtcggcagccgtgttccgcatctgtaaaatcccggaacggttcagacagagagaagaatcgaaaaaagggtaaaaaagcagatgtttcacggcataaaagacaagtgatggacaagaaaaattgtaaaacaggcaaacgcatgaaaaggcaggttgaaaaaatcctgatggttatcaatgtcaaatgggaaatcatagatattcttcaaataaccaatcggcgttttatgtacaatccgcaaacgggaactttaattttaggagacgaaatctacggtaaaaccatttgcagttcccattcacaagagttccatgcgtcaagagcagaaggctgtttcgatgattatttgcgcgggtggattggcacatcgaaaagctaccctcacgggattatccattttgcccccgccgtcatcatggaacagttcgacagagggtttgacgcattacaaatgttcgccggacttgaaggcgtaaacggagatactatcgtcagagggttttgtactttgccagaacaaaggatgggcgatttgctgcattcctccctttgagataccggttctgacaaaataagctatgataaggtatcgtgcctatgacaacatcgtcggtgaagggcacgatacccgtttgtaaattaccgcaactccgttggcggtttccttttatacctctctcttttcctctgctcttatacttgggcgaagccctcttccctttatatcaattatatgtataacctctacggtctcctctctgccgtcaccgtccgatttttcagatgcaaaggtaggctgccgcgcttgatccggcggcttgaagtgtatttcttgcaaattcttccttctacgaagagtaattggcaagaaaagccgtcgtatgaagctgtaccggcagccgggtaccgcatctataaaatcccggaacggttcaggcagagaaaggaaccgaaaagagggaaaaaataaacagttaggtaacggcaggaccaaccaccttgccacaaacaattttctattatgttacatgttcacactatcggacgcatcggcaaagattgccaagtaatttcaggagcacacggctcattcatggctatggacatagccgttgacgattattcaaaggggcaaaacatcaccacttggataagggtacgcagcaacaaggacaaccatatccgcttgtccgaatatctgacgaaagggagactcatacttgttgacggcacgctgtcatcttccctgtggaaagacaagaacggcgagagccagatacagctctccatcacggcagagagtattgcctttatcaataccggaaggcgggaaggcgcggcagccggagaggacaatgcagtaagcggagcagacggcgcacccgttcctcctgcagatttcccgcaggacgaaaaggaggatttgcctttctgataagagagtaaacctttgaaaataagcgaatactaaatgtagtatatcctatatgtagtagattagtaagccactcgtctgcgaatgtaggatatactactcttagtcaaactttattttagtatagtagtaaatactaaaatactacactgctaaaacaatagtttttagtgaattagtatatactaattttagtatttacgaaaaatagtattaactttgcaagtggaataaaagagtgaaacgatgacaaaaataattgcggtcttgaaccataagggaggggtcggaaagacgaccaccaccatcaatctggctgcggccctgcagcaaaagaaaaagcgcgtgctggctatcgacatggacggtcaggcgaaccttacggaatccttcggcctctccattgaggaagaacagacggtgtacggggcgatgaaaggcaaataccccttgccattagttgaaacggcaggaggtgtaaccgtcgtaccgtcctgcctcgacctctcggctgccgaggcagaactcatcaacgagccgggacgggaactgatattgaacggcctgattggcaagttgctcgaaaaccggaaattcgattatatccttatcgactgtccgccctcgttggggttgctgacgctgaacgcccttaccgccgcagactacctgattatcccggtacaggcacaattcctcgccatgcgcggcatggccaagatcatgaatgtgattgccaccgtccaggaacgcctgaatccgaaactcgctattggtggcattgtaattacccagttcgacaaacgcaagacactgaacaaaagtgtggccgaactcgtcaaggattcattctgcgaaaaggtgttcaagaccgttatacgggataacgtatctttggccgaagctcccataaagggcaagaacatcttcgagtatagcaggaacagcaacggagccaaggactacatggcactggcgcaagaggtactgaaattaaaataatcccgatatgagcaagagcgatttactgaaagacagcatgaaaggcggactggacgggttgctgtcacctacgaaaaagactaccggcggaaaacagccggtagcagcccccacggaaaaagaaacggcggttcattgcaacttcgtcatcaacaaaagcattcatacccgtatgaaattcctcgccatcaagaagaacatgtcgctgaaagacatcgtgaacgaggcaatgaaagagtatctggagaagaacgaacaataaacacaggcatggctaccgcgtctgcccaccccggagacggcagccatgcgtccttttttatccgcccgctgtttccatagggcgcattcctcctttatagtcttaccatctttctcttttttacctgcccgcaagtacaggcacatggcccgttttatccctattctaaccctgacgggcatatcccttttctaccgattcccttaccgctttcccggcttcattctctgccgtcaccgttgtgttttatcagatgcaaaggtccgctgtcgcgcttgatacggcggcttgaagtgtatttcctgcaaattcttcctttctgcgaaagagtaattggcaggaaaagccgtcgtatgaagctgtaccgacagccgtgtaccgcatccgtaaaacctcaaagcggttcaggcagagaaaggaaccgaaaggagggaaagaaaaaaacaacgtaaaattgacagcgatatggataaaatcaaattggtagtttacaacgagtacgcactgggttatatcatgcccgaacaacccggcaaagtttgtacgttggtggataggataacgctcggcgcaccgtttcggacaatgaatgaaccctatttcatcgggaaaagagataccgtcagactggcgggcagaaaggactttgacacgtttcggatagtgttcgacgggtacgacaatccggaaatatacgagtatgacaccgcacaataaagacaatagtaatcaaacaatctaatgtaataacaaattaaaatttatgaattatggaaacagcgaacattcaatcagtagtagagaacaacatcgtatcagttgcattgatgaatattcaaccgagcaactataacccacgcaagcactttgacgaggcgagccttgccgaactggccgagagtattcgtcagcagggagtattgcaacctatcggcgtgcgccccattgtggacaccgaccgcttcgagattattttcggagagcgcaggtatcgtgccgcccttatggcagaactgaccgaaattccggctgtcatcttgcatgtttcggacgagaccgccgccgaaatggccgtgacggagaacctgcaacgcaaggacgttacccccatagaggaagccaacgcctaccaaaagctcatggaaagcggtcgctacgatgtgcagtcattggccgtgcagttcggcaaaaacgagaactatatccgtacccgtctgaaattcgtatcattgatacccgaaatcgccgaacttctggaaaaggacgaaatcacaatcagtgtagcgagtgagatttgccgatacggtacggacattcagaaagaggtgtactataaacacttgaaagacagcgacagcatgttgtacgactgttggcgaggactgaaagccgccgatgtggcaaagtttatcgaacgggatttcacgacagaccttagccgttacgcattcgacaagaccctatgcgcctcatgcccccacaataccaacaacatgatgttgttctgcgagggtggttgcggaaattgcgccaatcggagttgtctggccgaaatgaacgcttcctatctcgtggagaaagccttgcagtttgtggaacaatacccctccgtatcattgggctaccaagatttcaacaataacatgcttgcggtggaacgccttaccgctatggggtacgaggtcgagcacctcaatacctatgccacggcataccccgaaacgccggtagcacccgaaaaggaagaatacgacactaccgaggaatacgaggcggcatacaaggagtacgagcaggatttcagcaactatatggaaaaatgcaagtcaattcatgaacgaatcgatacgggcgaactcacgttttatatctgcatcgggcagaaagaaattacgctgtgttacatggcaagtgctgccgccaatgcggacatggctaccgaaaaacaactttccccggtggaaaaattggaacagcaggacaaacgtaacaaggaaatagccgtcgagaaaaccgttgcagacgctaagaaacagattttggacgttgatacgtctgaaagcaaattcacgcaggacgaggaaaagatgatatatttcttcctgctgtcgtctctccgcagggaacacttcggggtattcggtatcggggagaaaaaagcctaccaacaccttgaggacgaagaaaaaatgaacatcatcgccaacctcacggccaagcagaaagccgttatccgcagggatttcttgatagacaacttcaaaggcgcatacggcaataacgctgctgcgaccctcttgctcgattttgcccgtaagcacatgcccgacacgctcgccgaaattgaaagtggatataatgaggtgtatgagaaacgccataaacgtatcgaggaacgcaaagccgccttgttggcaaaggaacggcagacaaagcccgaagaagccgccgaggcagaaaatacacaacccacggcagaggtacaacccgaagaacatacgcaacccgaagaggtcgcagcttgaccataattcaatagtaggacggagaaatccgtcctactgtctaaccaatcaaaagaggtaatgatgaaatgtaaggactgcaaacattacaacggtgcgacaatgcccggagcgggattgtgcaatgccacgcaggcacgtacttttgccacgacggtctgtttcaatggactgttcaccccgaaaaaacggcaagacgaaccggatagcaagaccgggaagaaatagcgcaacgctacagagagagagccgcaggagcggctgtcttttttagcactgccgttggcagatctccctttttatcccttcgttttccttttgtacggaaatcccttcgccaacggctctgcccgtcgggacatgctttttccggtgcaaaggtattgccttggaggaacattcaagtaccgctacgctatttgaacacaatttttcagcagctttcccgattttcaatcgtccatatttcgcggacgctcaataccgcaactataaaattctgcccaaattccttgcctgtttctccctgaaaggcaatctttaatgcacgtaaaaatcaaatcccgacaggagaagcctgaaggcttccgaaaggagggaaaaaataaacagattgttcaactgattaatgttaagattttatggaaattcaatttgctatcgtgcgttccgaaaacagagagtatttgtgctacaaagcaggtgaagcgtatgtagatgccagcaaccctatgattgcttttaccgcaggtgaagatgaatttgaaatcgtagagccggacagctctttcagacagaaagaatacgagttcagaggcgaacggtattacctcgtaccacggttttatcgcaatggctggttggctcttatcttggtaatggtggaagatgaagacgaatatatcgtactttccgtcaatttggaggaaatggatgcgctcggtttgccggaccgtacctttatcgacgtgaacaattacccggatgcgttggactttttggtagaaaacagattggcgaccgattccggctacaaacgcaggagcggcttcgtggaataccctatggctatgttgaacctgccgcttctttatcagcataacccgcaaattttccaaaaagcgaacatcgagccattcggagaagaatgcttttgaaaaggattgttcccaaaaatgaaagtgtcgggttccgaagattgaatgtacaagatggcgtactgataacacagtcagtgcgctatctcctttgtctttatcgcccgccttcgtccttttatagtcagcctcccggataccccgccaccgcccgtttcctcttataattgcattctttcccttttgtagcggcacgagccgcctgtttctcccgtccggctttcccgtccctcaccgcacgggttttatccgatgcgaaagtcggtcgtcgcgcttgattctccggcttgaagtgcacttcttgcaaattcttccttcccaagcgaagcgtaattggcaagaagagccgtcgtatgaagctgtgccgacgaccgtgtactgcatcagtaaaaccccgaagcggttccaaaggaaaaggatcgaaaaaagggaaataaataatcaataattcacaagacaatgggaaaatacgattttatcaagacagggaatctgctttattggcatgacccggacaacggtttgtccgatggggcttaccgagtgatttctgcaccggaaaacatggaagacgacagcattattctgatttcgtccggtacttcggaagcggaggttttgccttcggaattatcgccgataaacacgggcagaagtcataaagaggattttttgcgctggaaagcggaacgtgaagccgaaggcatggagttttataatcgcctttccgaagtcatggaaacggaggacgatttggccgtaggcgacatggtagcatttacaaacgattatggagtagtattcggccctcaagaggtattagctttcaggaagccttggaatggtgacagatgcgtatatcttgacagcgacgcctattggtttcccgaccgtcccgaccagttgaccctcctaagcaagaaaggggcggaatgacaacgacaaacccacccgccacaaaaacgggtgggttcatttcccctgcatgaaatcccatgctctattttaatcggctcgcacgcactccactcgtgcagcgatttccttttctatcgttcctatccattcctctccgacaccggcctcccggccgtattccgggtaacgcgaaacgatgcctatggtcttttctatgaacggctctgcggcctttataccgtaccggcgggctacttccagcaggtctgccgcagtaataccctctgtccggttgttgatagtcatgctgtggcggttgacgtaatacggtgcgtccggatcgaccgagaacgtgtagtcgtaggccggagcaacgtgccaacgcccgtcatcgcccatcaggaagctgaaattcttgttatggtcatcgacgttcccgcccagcacgttcagcaccatcaagcgaaacagttgccggagttcccccggcggcacgccgatacggcaggccgcctcgaatagtgcttcgtaagaatctgccgaggggttcatggcagccaatgtctggatatgcaccttcttgccgttccggcggtcgaaacgctcggtcaggaagtgcgctgtctgctcaccttccaacaggcggctcggcatcatctgaagcccggcgtctacggccatcaggtaataactgtattctatccgtgtcgtcggcatcttctggtgttcgtcgaacttgacgatcatcggcgtgtagcccggataaggggtcgccacctgtccggagtaacattgtccttccccgaaattgacgttgaccaccgctttgggccgtcgtcctcctgcggacgttcctaccttgaacaggctttcgaccatcaggttgcccgataccgggacgttgaaccgtccggcttcctcgaaagcctgccgggccagttggtagaggtcagcgatctccaccttgaacggtgtctccagttcctcggcagtgggcgggacgaactccaatgcccccatgccgcgccgtccgatataggcgagacggtcgagggcggacaagtccctcatacggatatgatgcactttggcccattcgttgaacacggtgtttccccaatggtcgggcagcgaatcggctatgaacgagggcaggccgccgaaaagccgctcttcatcgggatagaccggcaggccgcgctgtgcggcaaccccttttaccggcgcacggagcggggcgatgtcgtagccgtcgcggacataatcgctgtcgaagtagaaacaggctttgctgcggtgtccttcccgattggcgacaagcgtgccgacctttttatcccataggattacatcgagactttctatcatttcttgcccctcctaactcgtttaggtatcagtttctcgatttcccgaagcgccatcggcggcatgggaagttccggcagaatctccgcgagccgctctgcctgaccgagcgcacgcagcagggagatgaaattggccaaggtcaggttacggctgaccccctgctcgaaatggctgatagtcgtctggcttacacccgactgttcggccagctccttctggctcatgcgggcggccagacggtactccttgacccgcttcgccaaaagcgtcagcatatcgctgtttgtggtatagttcgttgtttccataatgtcaatatatcactatttatatgcaaatataacaacaattatccatatatagatatataaattctcttttttagcttccagccgtccttttctaccgctttcaggtctccgtattctctcccgtctggctttcccgtccgtcaccgcaccggtttttatcggtgcaaatatgggctgtcgcgcctgattccgtcgttttgaagtgcatttcttgcaaattcttccttctgcgaagcgtaattggcaagaaaaaacgtcggaaagggctttttcgccagccccggaaagcaccataaaacccgaagcggctccggcaacaaggaagccgaacagagggaaagaaaaacaattattaaaatttaacaaatgaagacattagaagaattattgcaagaactgggctgcgaaggtagcgcattcgacagtaccggagaatttacaaaagcgggagaaaaggcgtatgaacgcttggagcacttgctgtatgacatagaaagtcttacaggcaaaaaggtgacacccataattgaggaacttgacagaatatgcaacgagaactattaaaattcaagaatatggacattaaagaaagcaaagaataccgcctcgccaaagactgggaaatggcggtaaacagtttcagtttcaaccccgaacggttcgcggcggcaatcccggacatgcacccgacgcttcagcaaagcctgtaccgcctgattaaggcgtgtatcaaggtcatggcggacgaaacacgccgttacgatgaccggaaccgggcatcgcacgaggaagcgaagcatatcatggaatacctcaatgaacacggaaaaaatgtaccattaatataaaaacgacgatatgaaaacaactaagattcaattcaacggcaggtcttattactcccgcatcgtggaatctgtcgatggcgaagaattgcttatcggttcgacaatcctgctcgatgccttgcagcccggcagtttcaatgacgagaacgaaggttttgccagtaaagaagccgaaaggatttatgacgagattttcttctttaccgacgagagaacgcttcagcttcccgaaaacgagttgatagccgaactcaaaaaggataaccccgattggttcgagtaaatcatggaataataatttataaacttagaattatggaaaaagaatatgtaatgcaggtcgcacagaccattaaggaacagttagtagcgttaacccccatgaccgtcctcatgtcgtggggtatcaaagagtttgccgccaccctatacagggatttgccggcactccgcattaaggtgaacggacggctgcacgcagggtacgtcatcgtcgcactcaacggatcggattattacgaggtctatcttgtgaaaggaatggaggtggaatgtgtgaacgaagaggtttgtttcgacgagttgggagacgttatcgaccgggctatcgagagcggcacggacaaagccgagtacgataaattctgcgaacaggagcgacagaatttatatgtaactgttgtcactgtctgattcctctttttaggggatgaaagccgtgcctttcggaaaacgagcagggtacggcttttctatgtataatgcagaaacgaataaaaacctgccgtttataaaacggattacctacgtgttacagtaccttacctcttattgtaaaaaggtttgttttatcttttggccggcagattgtttttcacttcaagatgtcgtttctttatctgtctactgcctttttacttgcagctctatttacgaccagaatgctcgcttcatataaaacccacatcggcaatgtgaccaatgacaacgtgaacacgtccgaagtcggcgtgatgacagccgcaacgataaggataatcactatagcgtgcttccggtaacgtcgcatgaaatcggcggtgagaaaccccaatttggcaaacagccatgataaaatcggaatctcgaacacgatacccattgtcaggcacatcagcacgagggtcgaaatgtaggattgcaagacgatcatgttctccacttcaccgctgacctgataggttccaaggaaacggaatgtcagcgggaaaataagaaagtagctgaccgccacacccatcaggaacattgcatagccgcctccgactatccgcacggcatatttccgctcgcaggcatacagggcaggcgacacgaaccggaacaactggtaaaggatatagggcgacgcgcacaggacacccgcgcataatgccgtcttcatgtggatgacgaactgcccggccagtcccgtgttgatgagctgcacggcaaaactcccggtctcgccgccggcccatgctgcaatccggttgaaaagacggtacgtgatgaagccgtcgtttttcggggcaaggataacggcaaaaagtttttccttaaaacaaaaggcggcgataccgaacacgacggccacggcgacgattttaacaatcgccgtccgcagcacgtccaagtgctcccaaaagttcaagccgtccgttttgtcttcctttgccatgtcactcctctttcttgtcggtattttcgggactgatttctttctccatgccgttcataccttccttgaatgaacggacacctttgccgatgcctttcatcagttcgggaattttgcgtcctccgaagaacagcaggacgactaatgcaatcagcagcacttcctgcataccgatgcctccgataaataatggtatcatatgaaaattgttaaaggttgttcgattaactcaatagtcgttttcagtcatcgttccgccggctattcccgccattttcagaaagttccttcgtccatgactccgccttctcaatccagtcctttctcatgtaaccatctcgacaggtgatcggccacctccacgttgttcaaatcggagaagggaaaatgggtgttgcccttcaaacctatctccggcagatgaatgaccgtgacatcgccgccgtgttcgttgagcaaggcagcccatttgcgcatcagatgcaggcgtcgtgtccattcgtacagttccggccgttcgtcggtttccggcagattgtcgccatagtagatgatgatagggattttcgtgaactgcagaaattcttccatcggcacttccacgccttcggtcttcttcgacagggttagtactttcccttcctccggcatctgcccttcgggaaaaggcacgtttgttcccggctcgtaggcgacgatggcacggatgttccttgtctgcggcagtgtaagccatccgacacctccgccctgcgaatgggtgacgaagacagccggacctatcctgtcgaacagtgcggcatacgccttggcgtagacatccagatcgggagggccgagagttggcgtcatctgacggaaatactggttcagagcctccttgtcgcggctgaactgcacgccctcgaaataatcgggccagatgcccacgcggaaacggttgaaccacgtctcctcgtcgaagacgggggtaacggtcgcgggtgtcgtgctccgccccgcgtttccccggcggggctggtcgacgagataagtctggaaaccgcggcgcaggaaaatattctggaacccctcgcggccgtccggcgtagtttcccatgtcttggaaaactgccccacgccgtgggcgaagacaagcgggtatttccgggcatcgacgggtttctgatagaacacgtaggcgtggtcgccgtgataggtgcgccccagtgaatcggtgagcaccgtgccgcccacggcgaaactgccctgttcctcgatttgcatgatattcccgttgcgtgcgttgcaacccgacagcaaggcggcggccatcatataaaagacaacctttctcatacgcccttcctatttctggattttcgattcctgcaaagcgtcatagcggcttcccacgaccggaattgcggccacggccttttccagctcggtcacttcttccgacgtgaacactatgtcgcaggcccgcaggttctcttcgaggtgcgagagcttggtcgtgccgggaataggaacgataaaaggcctcctgttcagcagccatgccaatgccacctgcgccgtggtaatgcctctcgtccgtccgaaagcgttcagtacctccacgatacgcgtgttggcacggatggcttcgggctggaaacgcggaagcgtctggcggttgtcgttggcggtgtcgaaccgggtgtactcgtttatcatgccgccgaggaaaccacggttcagcgggctgtacggcacgaaaccgatacccagttcctcgcaaagcgccagcacgccgttttcttccaccgcgcggtgcatgaagtgatactcgctctgtatggccgtaaccggacataccttgtgcgcccggcggatggtttcagcattgacctcgcacatgccccagtgcagtatctttccctcccggataagctcgccgcatgtttcggctacgacctcgatgggcgtcgcagggtcgacgcgatgctggtagaatatgccgagcgtctccacgccgagattgcgcagggagttctcgcatacgcgccggatgtttgtcggggtgctgtcctcttcggtcttcacctgcacgccgttcacgaacttgtgcccgaatttggaagagacgaacacgcggtcggtatagcctttcagggcttcgcctaccagtttttcattcttgtggtagccatagctttcagccgtatcgaataaggttacaccccgttctatcgcttcgtgaatcaaccggatgcaggtcttttcatcgggagactggctgcggtgatggttcagccccatgcagccgaagcccatcgccgaaatggtaaaggctgccttgccgctgctcaaggtacgctgtgcgcggactgctgccattcctgctggaatggttgctgccgatactgacgatttacctgtaatggctttttccgcggccgttactttctccaatgccggcgcgatgcagatggccgcgcctgccaatgcggttcgtttcaggaacccgcgacgactgatgccgttctcttgaatctgttcttttttcatgtcgttatctgtttgattatctttctgattgcaaaattagataggggaattaagagcctgtgtatcaatttcacggatagaattaccaatttcaacgggccggtaagaacgatgccggtataccagtaaaattggtatccaaaacgatgatttcggtatatgccgtaccatcgggaatccgtatctttgcttttaattaaaagcagaatgaaaagctatcacagaaaaatagctatatttgcaatgacttaaaaaagaggaaattatgagtgaaataatgaaggttgatacagtccagcagtacaacgactattttggcgtggagaccctgcacccgttggtcagcgttattgaaggcagtaaagggaagcctctccggttcgggaaaaaactgtataacatctatgctattctattgaaagatgcgaactgtggaaatcttaaatatggaaaaagtatatacgattatcagcaggggacgatgcttttcctcgcccccggtcaggtaatgggatctgaagatgacgggcagctgcaccagcccgaaggatgggttgttgcatttcatcccgaatttctgcgaggtacaccattggcgcatataatgaaagattattcatatttttcttacaatgccaacgaagccctgcacctttccaaacaagaaagacggacggttatagaatgtatggaaaaaattcgcattgagctgcagtatcctatcgacaagcacagccgttcgctcatcgtggataacatcaagctgctgcttgattattgcatccgcttctacgaccgtcagttcatcacccgcgacaatgccaatcacgacctgttagcgcgtttcgaggaccttctggatgagtatttcgcctctgatgcccctgcaaggcatggagggatgccgactgtgcaatattgtgcatacaaactttgtctttccccgaattatttcagtgacctgatgaaaaaagaaacgggaatgcctgccctgaaacacatccagcagaaaatgctcgatgtcgctaaagagcgggtattcaatacggcgaagtccataagtgaaatatcctatgaacttggatttccatatccgcaacacttcagccgttggttcaagaaaatggccgggtgtacgcccaatgaatacagaaccgcaaattagctttattttttattttgtgaatgactgaccagtaaaacaccggatatgacaagtatggccgaaaccggttcatcccagctaaaaatgtcctgcccgattaaaatggcaacgacagaagctataataggctgtaggttgatgtaaatgctggcagtggtgggctgtatccccttgagagcgacgggatatagcagattgttgagaacagttgccagcaacaatacgaatacaagctggagtaatggttgccaacagaacgcggactgataaagcggttgcacgtacaattcatttatactgaacggcagcatggacaatgctgcaaataggaacatccatttttgaagtgtgacaggagagtattttatcgccactcttcggatgataatcagataaaatccgagcataactgtattgacgatggcgaaaacaatgccaagtatatgattttcaacggatgcggcaatatccatttgtgaaatcaagacccatgctcctgcaattcccaacagaacacctgtcaacttccgccggttgatagcttcttttaaaaacaatacggaaaagagcataactacgattggatttaaggcgacaataagtgcgaagtgaactggtgtcgtataattaagtccccacgcaaaggaaagataagtacaagcaacaccggaaataccgcccaaagcaatcaccatcaagtctttggcattgaccttttctctcctgaaaacaagcccgatcgtccaaaatatcagcgtggcgaataaaacacgagaggaggcaagcccaatcggtgtcatccactctgccaggagcgatttaccgacaggtacattcaaaccacaaataatttgtgtcgaaagcatggcgatatgtccgttcaaccctttgttcacatggatttatctgtttgatagagagtgcaaagatacgactttattttcataaactcccgtcgaaactgcggtaaaagactgaaaggattttattgttgtttccgtaaaaatggttgtatcaaccgggctgtcctcaaggaaatattcgcagatatactgtccgaaaaacaggttcgggagtttatctccaaaacggaagatgcaggtattatacaaaaaaagggggactggtaaatgtacccgttatataaaaaacacctgatttcccttcttttatgtagggccgcaagaagctgattttgaactataagattttcacaatagataggaaacgccgaaacgtccgcaataatcacggaatcattgcaggcgttttttagttccctcatatcggaatctggctttctatttagtttcccgtttgttcagcacgtcctttatcatttcttttacctccattcccacattcacgaaattccgataaagaatgcgttcctgttcctccctcgacttgaacgtgtggaacttcagtaacggtacatacgccgcttcccccttcttgatttccttcatgtcgaaatccgttttgcagaagaacttcgaggtcttaaactcctccgcttcctgtacgttcattgagccgcctataccggtttttgtttggatgaagtcctgagccgtctggccatatatccaacctatctgcctttgtattgaaaagtacccatatcagcaggattttgctctctattacttaatgatgttgttctatttttgcagcctgtaaatcaacgatatgtaataaatggattatatcgacaaaatatttaagacagtatcaattaaggatagccgacggattattgaactttattttcaggagctgtattgttttgcgccactttccaacaaagccctctctcaaaaattactcttgccggtacctatcgtgaccgccataaagaacgaaggtatcaggctgggcatattggaacaatgcagcggaggcgtagggcttactcataacggaaaggagtatgtggaacaagctcttggattcaaggggattgacctctgcctgtatcgccgactggcggaaagcgaacaggcaagggacgcatacgctgacgcgctgagtaaaaaataccgtgcggcattcgacgaacgccccgtagcggatgtagcactggaccaagcccaatgtaccgtacagacagcattccgcagggctttgctctgcttggcaaacggcacattgacaggcagacaaatcgtatgcatgggcgatgatgattttgtcagccttgccatcgggtttctgctgaaagaactttatcccggtccaagcatctgcccgacacacatccatgtacttgagatggacggtcgttatatcgagtgtctggagcggctggccggacggttcgccctgccgataagttgtgaacgggtggatttgaggatgcctctgcctccgcatttgtgcgggcgtttcgactgcctgttcaccgatccgccttatacgcaagagggagcttccttgttcctgtcacgtgccattagcgtactgaaagaagagtccggattgagaatctttttctcgttcgggaacaagtcggcaacggaggtttactttctgcaaaaatgtttccaactgcacggactggccatcaaagagatgttcacccggttcaatgaatacatgggcgcatctcttttgggcaacaaaggacagctctttgtcctggaaacgacagaacgtacacgcgccttgtttcctctcgaaaaacgagggcgcgatgacatctacaccgcagaccgcaatctccggcaaaaccgttaccgctgccggcaatgcggcaaagtctatgccgtggggaaagaggcggaatatcagaccatcagggagttgaaaaaacaaggctgcaatgtatgcggagctacggttttcgacagactgcacaaaaacgggaatacggataaaaagcaataccttcccttagggcatcacatccttgcagacttctacaactgcgacccggaaaaactggacgatgtggaacagattcgcacattcatgcacgaagcggcagtaagtgccggagcgaccatagtacaggaaaactttcacaaatacgccccagtgggtgtgagcggtgtggtggtcatccaagaatcccacttgaccatacacacgtggccggagtgtggttatgccgctgtcgatttgttcacatgcggcaccaatgtccgtccgtggactgctttcgactatttgcaggagcggctcggatgtgcgaaagtggaatacagcgatttgatgcggggagcctatgagcggccaagcctgttgcggtattcggaaacggaacagcctgccgtgcggcggaaaaagcggcaaaggtacgacgcgtcttcgaaatggaacagacgggccaggtctttgacggactgttctgtgttgtccaaatagcgtttgagttccgttacgacaaacaggtcaatgatttccttcggagtccgctgttctattttgcaggttatcttataaaggtaatcggtcgtgatgcaaagcctgtccgcataatatcgtacatctctttttacatggaaattcttagccagcagtgacatgaacttgccgaacagcacccttgactgatccttttgataacacttgcccaagtcgggaaacatcggcttgaacacaatatctaaagccagaaaaacattgtaaatgcaattttgcaggatgtttttccggctttcttcatcaccgttctccatcgcccatatcatctgcttgaacactccgtctgccaatgagtattgtgcttccgaaagtcggcagaccggatattcatacagtccgtcccaaaatgcgggggaagtcattttgtagaaaatctcccctgtcagttccaatgacaaggatatatattctgccgtgaatgaaggagaaacacacagcggtgcaaataaggtgtccgaaaacaacacaagcaaatcacctttgcggaatgtccgttttcgtgtattggtggttacgacagcccggccttcaacgcataacagcatggtacacccgtttgccacgaaaggcagtttacctgacaagtcacgcaggcttgttcttccgtgtttgtattgttcgccatgcgagagagcaaaactttgtatgccggacgttatcataacaatttcctttccatcgttacatgggttggctcgaagcaatgctttttatacaaagagcgcatcggtacgttcccggcatgaaccttgccgacaatataagccgccttgcactctctcgcatattctatgcttttttcaaacaggtcgtctacaatttgcattcctcgaatgcactcatccgcataaatggacttgaagttggcataaacctctccggtcaggctgttctgctttttctccatccatacccagcccacaattttaccggattccgtgtcttctatcacgatcattccgcgtcggtcttttgctttggctaatttcttgcagtggaactcgaggtcagtaatagccttttctccgaatgagatttcagaaatttcaatttcaaattttgccaccgcttcaaagtcttcctcttttatttctcgcatattgtacatgattccaaatattgtttttccgttaacaccaatctgtccggcatgatgcccataaaaacttatcccttcttcggaaataagaaggtctgtagcttttccaatcccgccttgtgcttttgaggattgctctttttcagcttggcaatgttctgtaatttccattttacggacggatagcggcttaaatctccggcacagcatttttcccaatcgggttcgccgttttcaaatgacagaagaaattcccggtctgtttcggtcaggctgtcgtttacctgctgaatgaggttatgccttgcctcttcataatccgaataagtgaatggagtatcggacattccctcaaactgcttttccagtgcttccgtctggtcgatggcgttcggctgcaaagattcgatgacaggcttgtcgctccccaacaggcaaagcatgaagccgttcttgacatcatgaaacgacgccatttccatatacttgcaatcgaacaggtcccgtgggtgttggcggcttaatgccgctgcaattttgcccccgtaaagctgcgaataagaaactgtacgtgctttacaggtcatattgaactccgtttcagcccgttcgcacagtttcctgtcctctgtctctccgatgataccccgctttgtcccgttcacttcgattttgacggtcgcaccgtccaaagtacattgtaatttccagacatcatgcttgtggatcacttttatgcccggtatggatttttctatgtagcttttcaaagttcgcagatggttgttgattgcgtccagactctcggccctttcctttacgggaatataggtgaggtctatatcgactgaatagcgaggcatgtttttatgaaacaggttgatagccgtacctccatgcacagcaaaatctttgatgcggtacacggacggcataatgcgtatcaacaatgccacctgttttttatagatgtcattcatattcgttcagttctttaggtacggttattttgtatttggagatataaatcccgttttttgacagttgcaatttggaggttcccagtcctattttggatgtatcaagtgcctcgaaccaatagtgtcccgctttttctgccatataaaggaacatacgctttactttaaggttcttggtcgtttcgagcagttgctgtagcatttcgggacgcagcgttgtcagttgttccatcatatagaacaagtccatataggaatattgttgcggtgcaagcaacagacattccaagaatgcctgttcaggtgtagaaaccagcagatccacttcgtatttcacaatcgttgcggtctgcggttctgaaaaggtatcggtggaaaacggttttatcaccctgtcgaaaacatcgtggcgtatccattccggaacacgctgtttgccgtgtgccaccatcagcaacggtttccccataggcacatagtggttgaagccgaacagttccaatgcagaatgagctgcgacacggaacgtcttgcccaattgcctgttgtagcaggacaatgcggcgtatgccgacaggctgtctcccgttcggtacatgactccctttgacagcatctcaagccagccggattcccggtatctttttatcaactggtcggaataaccgttccttttcagccattcggagaataacaatcctttgggagtggcggaaagcagcagttggtttattttgcttttttgttctatatccacagtatatgatttgttttctttttcaactgcaaaggtagcattattttccgttccaaaggtcttgaaagttgattttgtttcggtataatatactttttgtgtagtattgaataccaaaaccaactccacaggattttccaagataccggaaacgccaaaacgcctgcaataatcgcggaatcattgcaggcattttttttactttccctcatatcggaaacaggtttcttatttcgcccctcgtttgttctgcacgtcctttatcatttctttcacctccattcccacattcacaaaattccggtaaagaatgcgttcccgttcctctctcgacttgaacgtgtagaacttcggcagcggtacatacgccgcttcctccttcttgatttccttcatgtcgaaatccgtcttgcagaagaacttcgaggtcttgaactcctccgcttcctgcacgttcatcgagccgcctatgccggtttttgtttggatgaagtcccgtgccgtctggccgcagatccagcccgtcggcatatccgagattttcgaggcgggtacgaggctgtccatattttcgttcagattgatggaagtcttgtcccggtctatcgtgacacccttcttgatttgcaccaccttgccgaagatgtcgctcgacaaccattccagcgtttccttggcacgggccgaaccgctcaccacgttacccaccgtcgtgatgattttctgcatacccactttcccgtaatccgcttcgagctgcggcagttcttggaagccgagcgtcacgctcaccttgttgcttcgtgccgtgccgatcaggcggtctatcttgtggaagtacagcgtcggcagctcgtccacgataatgctcacggggacatttttgccctgtcccgtattcacacgggtaacgaggcggttcaggataagggcgttcaacgctccgataatgctttccatttccggatcgttcgctatcagcaggtagctcggattcttcgggtcgctcactttcaggtcgaagtcatcaccgtcacggtggaatatccagtaactctctttggtcgccagacgagaggtatagacgcgcaatgtaccgatcataccttccaactgttccatcgcgcgatttttcaaagcggtctggaacggaccgagcagcggggcaacctcgttgtcggtctccagtacctcgaagatggtctggtaactctcgttcaggaacgacaggatatgcggcatatccgaatacttgcctaaccagtaggcaggttcaacgatttccccgccctctttggcgcgtaccacacccgtcggtttccagaatttcgtctccgggtcctgccgtttttcagcgtacaatttgtttcctttggcatcgtaaggctcgcgttcatagttcacgaaaaagtagatgcaggcggcgaggaagttcacagccgaagtctggaaaaactggtcgctgccgccgcctccctctttcttgcctttttgcagggattccagcagcgtttccgccgtttcgctcgccgcagcgaggttgttgatgtattttgcctgaattggatttacccggcggctgtactccacgtccacgaagttaatcatattgaattggcagccttggggcaactttccgagcttctggtttttcttgtagtggtagtacagtttcgtggccagcgtcgggaacttgtagtcatagaccaccatcgcgaaccccttggccgagtgctgtcggataaacggctcgatgatactgaatgtcttgcccgaccccggtgttccgactacccatgttccacgaaaacagttggttatattggtccagcctttacggaacttgcccttgtagtaatatcgcatggggatattcacgctgtacggagtctctatcagttcctcgcattgctcgaaactttcattctcgaaattgaaacgatccttcatcagtccctctttgaggaacttggagatgttatccagtgcgacatgcacgaggataacccccgtgagcgataccgccatatagagaataatgttcagcggcagcgtgtagaaccgcgtctccatcggatgaccgaacagccatacggacagcactaacagggcaaagccgctcacgagcgggtacaagacctgccgccgggcgttgaattccaaatgtttcttggctctggtgccgatacaggtaatgcagatcagcagcaccgtggcgaccttgctgtacacgaggttgccgtcgttatagatggcccaccgtttgatacgtccgtgaatgtcgcagagtatgccgccccagtggtccagcatggccgggtcgatggcatactcgaaaaactccatcagtacggagacatacaccaccgcacggaatatccggtaaaatccctgtaattccttgctctcttccattgctatgtcaattctttttaataccccagaggacgtggatgtgaggccattgcatacggttatcagcggaaagctggcagacatgggaaactgcatatagaggtttaagcccgtcatatattgcagaagcccgtacttccgctgtaaacttctcaaggaaaatccggacggcattgtcagagccataagtcatgaaatcaatgaaatcttcaatcaattcttcattgacatagcagagctgaccttggaaaatatcatggtaacggctgatacggccgttccattctgcccggatttcttccctgcgattctttacggagggaaacctcttgtagcagtctattccatcgtcgaggaatatgaaattaccggaaacgtcctcttgtttaggacatttgcatcttaacagatacccgaagaatcctttgtccggatgtactatatccacatactgtggtgcttgaaaatctttaattccgttcataatcataaattcagttgttgatggttataatgggacgcactttatgcgcctgtgtcttgggcgtttcctgcatggttccgctggctgtcgagtagagccatgctttgactgtctgctgtccttccacctccgtcgatgtccaataccagcactcgtcggcctcggtcggcagcgggtcgccgccgcatttctcgataatcggattgatgacggtctgtgccgaatacagcagacgcatctgtgccaccgaggggatataggcgctctgtccgtatttccacaaggcaaaaacggcttcagccatcggcgaggccgtttcttccgtatcgtacagggcgaacgtgttctcattcccgtcgtatgcagcaatgtccgccgacgtaccctgctcgacaccgaggctgtcggcaaaagccttcggcgtcatgtcccacagatagacggcatagccgtttccttccgtttccccgtccgaataggtatggaagacgacggcaatcgcctgtttcccggaattttcatactcgctgtacggcacggccttgccgtccacgcagaggacatgtccgggacgtaccgtcttgtcgggttcttctatatgtgcgtcgcaggcagccaatgccccggttatgaggagaaccggcactacctggcacgtttttctgatagtgttctgtttcatctttcccttattttataggtagtttaataccgagggcaactcctgtacgcagcacatcggccccctttatcatcacgtctcccttgacttgccagtatagcgtccagcccgcccgcaacacatagttgtgctcgtagccgaaatgcagcccgacaaggaacttcctcgtatcgcttccgcccgaagccccgatacggaggcttccgtaatggttgcgtcccctcgtgacgcagggtttgtaagccacgccgaagccgtaggtacggtaattctgccagaaagatttcgggcatacatgcttgcaggattcgcactctgcccattgcaggtagccgttggcaaagaactcccacgcatggcggtagttcatctcgtgttcgtaggccagcgtcacgtccagctcgttcttgtacagcagccccgctccgagcgaaaggcggccgctgccccgttgtgcattcgcgccgacggcgaggcacatgcaggcaatcgtcaggataatcgtctttctcattgtcattcctcctccagcaatgccgtgctgaacgaatcggccgacagcacgtcctcatagtcgatattcaggctgatagcacgcccgctgatttgtttctccgtcatctcgatggtcagtaccttgtcgttcgggaacgtcattttcctgaccacgaccacattccggtagccgtgccggaacgtcttgcccgtctccagcaccagttccgggaccagttcgatgacttgcacattagtcgctttggtcagtttcttgtccgccagcttcacccgtatctcgtcaatgtcgaaacgtatgttcgtccggttctctattgagaagtcgatgaagaaatactctcccacggtgtagatgttgttcaaccgcatggtcatgcggtgtgccttggtggcgacgttgcggatcttcgcgggcgagttccagatacgccgggcgaagcgtgtcatctccacggtggacatcgagaccgccgggttgtggtaggcgtttcgttcctgcaactggatttccttgtcagttaccgcctcccgcacccgtgtggtgtagagcagtgcatactgcgtgcggtagcgttccgttacgatggtcactatggccagcacctcgccgtcctcgtgtccgccctctttcggtttcaggcggacgatgttatctatcggctggtcaccgacaaccttatcggtggagatgtccacgaagcgtaccggttccgaggccgtgatgaccgtcgttacctgttcatttaccgtaagttgttccatctcctcgtaggttcgttgtgcctgtacattcggcgttcccagcagtcctgccgccagaagaaatgccgttacgattccttttttgtccatgtcattgatttattgattttgtttttcttcccttatctctttttcctcttgtgctttgttcctgcattccagttcctcctgaatccgccgttcggcaatctcgcagtacacctgttcgatttcaaatccgatgtagtgtcgtcccgtgcggatagcggccacggcggttgtgcctgacccgatacagttgtccagtacaacatcgccttcgtcggtgtaggtccgtatcaggtactccatcaacgccacgggcttttgtgtcgggtggtagaacgcgcctttcttgtgttccttcggcatgaagatgaccgaggtcggatatttgtcatcggctatgcgtaccggtgagagtttcatcgttccgtaacaacggttggtaaatccctccgttttacgcctcccgtgatttctccgttccggaggacacggtgtcatctgcggatgatagaccggctgttttttatagaataccagaatatcctcgtgctgccggagcggcatacgtttggcattgagatgtcccgtcacccgatctttctgccacacgaggttgtaccgccatagccggggttgcgacagcatgagccatgcggagaaaagcccctgtccgaacaggataatggggctgtccggcttggtaatccgccggtattgctcccacaaggctgcgaacggtatctggcggtcccagttcaccgacggattgctgcgatttaacaccccgtaaggcaggtcggcgattatggcgtccacgctactatccgctatctgtttcatgccctccatgcagtccataaggtaaatgcgatccgtctctatcatattgcgtctgttttcagttctacaatttgtcgggcgctcatccaggtacagcgttccgtccgggttttccggatttcacactcccagagggtattcttctccacatgtttgaaattgaccgcaccgtctctcggcccgtaaaaaccggtatgcttctggaaggcgaataaggcaatcctccgcccgtcttctgcctgaaagttgcatatcagggcgaatcgtacccctttgtgccaccattcggtacttacgagcttcccaacgaatgtttcgggcttatcgggagcgatgtagtcctcgtaatagaagccgtccgttcccttatgaagttttgatatgtctgattccattgtcactgcccttttagttcctgttttcccgtccgttcaccagatacacaaacgtcccgtatttcagcttcaccttgtttttcttgatagccttgctgatggcgttactcgttttctggtaggcattgttcaccgcctgcataccccattgggcgaggctgttaccgtatccgctggtattcatgttcatgctgcccgacatggcactgctcgccacatccttgcttgtctcgcggaactggctgatgggtacgtaaagtccttccagcccgtccgtatcgtagattgacaagctgaccttgaccagttcgtcctccaccaatatgctgttgatgcttccttttacacgtccggaagagaaaccgctgactgtggcatacaggtaagtaccacgcctgaccacgctctcgttgatttcgatgtcgtccagcaggcgcagccgcacacgcgagccgtccacggccttgatgttctcgtcgatgatcgccttgatgagtttcggttcccgagcgtctttcgccagtgtgttgaagtagtccgaagccgtctttaccttcttcaccacctcgcttgccttgtccgtctccgcaggagctttgaccgaacggctttcctcgtcgatggttcccttggcctgcgtcatcgtgtccggcggagccgccgttgcggtgctgtccgtttcggacggcatgacctcccgttgtcctctcaacctcgcttcggcgagtgctttttccagttctgcgagagcttcctgctcccgcctcttggcatcggccgcttccgctgccagatcattttccttttcctgccggtcaagcagggcgatgtcctcttcggtgtactgcgattcatattcctcttggttattgtccggttcgtcccgctcgatgttgtccacagcggaataatcttgtatcttgccccatgatttggccatgttctcatacttgctgccgataccgtcgccacccttgatttgggcgtccggcaattcgggattcaggaactcggtcgtctggagtgtcttatcctgtacctcgaccttctcggtatggaacaggtcgaaaaagaagtacgacgtgccgagaaggggaatatagaggatagccggaagcatatactttggctgcctgaaattaattctcttgaagatattgttcattgtttccctttaattgagttgcacatacttgcttatagttctctcaaacggcatattcataagcctgccgttctattccggcctttccgtaccactttccttcgtatcgaatcttcgtacatgcggtacggaaagcatcttatgccgttcccggagcacggaatcctgcatctccgtggccgtccggcgggtcggatgatggcggtacaccaccgtcaggcggtaaatattccatgtcagcccgcagatggcgaagccaaatacgatgacgagaaacagcgtccggtgggcgttggcgaaaccctgtactttggccactgccttgtcgatacgtgtcgctttggcgaagcgtcgcccggcatccacgtcgcgttcgtagcgctccttgtatttcgggtcgttcttgtccggcatcttctcgccgaacagcatacgtctgaatcctttgatattcataggactggtagagttaatagttgctttttgtcttttgctcgatgtccttgttcagcagcgtgcgccagttcacaatgagcagcccgtgcgggttgttctccgtccggggtacacgcttgagctgtcccgccgtaaccagttcgcgcatcaggatattgctgcgccgttcgatacgctgccgcccgtagtaagtgaactccatcttctccttgttgaaggtgatactgtcgcagaaaatcgaaaagacggcactcgttcccaagatgttggaatagaaacctttctccttgagcgtattgtactgtgccaagcccgtttcgtccactaagtacatcgctttctccatcgtgtagcggatgtacttgtcgtcgggagcaagggtaaagaagtagtggtggaacatctcgacatggctcttggcttccacgtcaagcgtttcctccatcgtcgtgcggcgtaccagtataggcacgttgctgtccagcacatacaccttcttttgagcgtccgtaaccatcatgcgggccgtccagatactcgacacgctgatgatgacgcaccccacgagaaaggcggtgcagataattccgaccagtttgattttgttctctaaattcttgatgaccattttgtttgaatatttatcgttactttgttatctcattaccgtacccattgcgcccgtcgccgtcattttggcctgctgtgccacgccctcgccgaagtttcgggttgagaacgccgtgtcaccctccggtatcatccatgccgcaaggtcggggacgaggttcaggcattttagggccacgatgcttgccgccatcagatagcccgccgagaagaaggagttttgcaggtaagccgccatcgtctgctcgcttgccgttatcgccgttaggttctctacctgtatgcaaagtacgatgtcgaacagcagcagcacgtagaagcccacgaagtagagcatcgcaccatagaaatgcaccgtcagataccttgtgagccacttcgcccatgcgccttcccacttgggtaggagcgagaacgcccattggataggtccgaaaatggtgagcattcccaaaagaatttgctgacaatagatggtcgcccaccaaccgattctgaatactacaagggctatcagcatgatgattttgtcaatccccacgattacccccgaagtcagcgaggtgaaccacagcttcgccgcatccttctccatgttcgttacctcgtccacacctgtctgttccatcgttgcctcgataaggtttgggtccgacgtacccgtatgggcgacatcggcctgtgcctgcagggcagtgtacatcgtgtcgcgcacgtaaatcaactcctgcacttcctcgaacttgtccgagatttgcgaggcttcggcctcgtacaggtcatgtgtgtacgaaccgacgcagttcgggatataggagaggaaatctaaaaagcaccagttgctcccgctgtttgccatgcccgtgtctgccggaggataccaccagcagaggataagcgacacggccagcggtctgaagagcttcatcacgtccaaaggctcgtgcttgaccatcattttgtacgccatgcctgccgccatgatgatggcgaatagggcggccagtgccatgcacatttgaagaatccaccagaagggaccttgcgagccggtaaaggtcgcatcggtcagaaactcgttggtctgaaaaatcacgtcgtcgatttcctcttccaagaggtcgataccgaaatccgaaagaatatttccgtctgccatacgttgtgtgtttttagttctttctgtttaccgtctcgtctccgtctcccgtatcagtttcgccgcccgattgcgcccctcgcacggcggaacgcgattcgttccaccggcccatcgcctcgcggacgataccgcccttgtccagtctccggtcggcggttgcattcagcagcccgttcgcaaccgtggcgttctgtcttcgggcaaggtagccgaccagaatctcgttctgccgtaccacgtcctcgtagattcgcaggtactctttcttccgttgtgcgttgggcatgtaggcgtccttcgtagcgtcaatggcgcactggtagacgtggtagtattccgtccaccgctccctgtcgtccgttgtgcccccggcaagggggatgcggtcgatgttgcgctgaagccgttccatttgagcgtttatcttatcgccctcggccagccacgcgaggtcaatctgccggtcggctacattcagtgcctcgatttcggcccgcttgaccagtgccgagtcgatggcttccgcctcgtctgtctggttgtacaggttcacacccgccagcgtgcggaacgacagtttgttcttgcttgccgccgacttcttgtacttgttgtgcagcagcgtgtaataaagttcgggcgacagagcgcccgtaccggtttccataaccgtaatctggttctgtttcggcgagtcatggttgtaagtaaccgactgcgccttgacaccgctcgttgcaactgctgcaaccgccatgagtaagagagttctgttcatattaatttccggttattcattattttacagttatttatatcgtatagtcatactttttttgagcttcctttactgtcataaatattggtattcattcctgactcgtttctctccttgcgagaaatatgtctcgtctttttcaatgcaaatacattttctattcgtatagatacaggcaattgcggtgctcatgctccccgaagcaaaatcaaggacagtatctccttcctttgtgtatgtttttatcagatactccaataatgcaatcggcttttggttgacatgaatcgttttgccttccgattccgctgttttgaagtatatcacacttcgtggatatcttgtccctttgttttcatgcctgaatgtaggattgggtacattgtttatccctgtccaattgcttcctctcttcgtgcggttcccgtaaggctcgccttcctccatgattggataataaggggttctgcctttgccaaagacacttattagctcatgtgcttttagaggttgttttttagcgagaagaaaattgcttgcttttgacttttcccaaacccagtcatatttaaattcatctaaattgccgcagcgtagaaagctgctgaacggttcgctgccaaataagaccgtaggtgcattttctttcctgactctcctgatctctttccacatttccgggaatggtattattttatcccactgtgaagctgtaattccaaaagggggatcgcataaaaccaaatcaatgcttgattccggaagaaaaggcatcacttcaagacaatcggccttatataacgtaatgtcttttgcaaaaacaatcttttccattgcatcaatctgaatgtctttttatcccttggtataatcccaataggcttgtttgtactaaaaattctttctctgtttttatttcccgatgtcgatggcatggaagtcaaactctaacctgtagatagtttgccttctttcccttttatcgttcgttaataatccagccgtcccgctttgcgccatcgtccgaaagccccgtcgataatctccttgaccttgggacggtaaatcttcgctttccagtaaccgatgcgcacctgtatgtaccgccacgtctcgatatacgcccggttcaggtgccgctcgatgtcgtccagcgacgtgttcaccgcttccagcaccatcagcaggtcggaggtcgaacattctgccgcccctgtggcatacagcacgaggtcactgaccgatttgtaaagctgtttcccgtcatcggcgatgtcccgtattgccttttcgttgatggccagtatcacggcatcgccggggtcgatgcgcccccgtttcacgattctatcgttgaagtcctccagcagtctcttgtaatcgccgatacggtcgctgaccgccgtataggtgcttttcacgttcagcaccgtccgcaaggactggtacatcacgtcgatgacgtcgaaggcacgggtgtagcggtccaagtccacattcagttccttgtactcgccgacctctttgcggctgtactcgtgcagcagcttgttgctgtattccagcgtactgcgggccagcagcaggctgcgttgcttcttgtggtcgttgatgtaggcttctaccgacacgatgtcgaacgtccattgcgccttggcaatgccgggcaggagagccagcagcacgactgccatcagcagggcacgtttcatggccgcacctcctttccgctgcctttgccgttcctgccgtttccgctccgcaggttccgcgcattctccacccagcgttcgtggcattcctccacgagcgtcagcctgcgtccctcgtccatatccaattcgggcagcacgtccttcagcacgtcgatgatgctccgtttgtagtgcatcatcttctccagtgacacgaggtcggcatatatcatcgtaatccgggaatccacttcccgtgcgatttcgagccggtcgcttgaccacagcagatggtacacctccccggtcggagtctcttccaatggtggggtacgggcatattccgtcgtgatcttgcacgaaggatgctctcgtgcaatctccgcaatacggtcgttcaccagtttcgttttctccgcgtccgacaggttagggtcgagcgtcagcacgtcggccacatacgtgtcggtgtattccgtggtcagttcccaactgatctgcacgatggcacggtgtatcttgataccgaggaaatatttcggtttgcgggctatcgagaccgtcgccttgaacgtgatgaccccgttgatgttcggcatggtcgccttacggacataggtgtagccgttccacgccccgccgtcctgccacgacaggctgtaagccgtcttgcagtcctgcatgatggccggtatgcggtaatagtcgtctgttgccacatcgttatcgcccgacgcctcggttttcgcgtcggtgtattcccgttgtttcttctgccattcggacagctcgcttttcaggcggtctatctgtgtcttgttcgcgttgtactgctgccggtacaccgccgcatcttccacgcttgcctcggcgatttttttcagcaggtcggcattctcgctctccaacgcgttgatttgcgactggatggcggctacctgattctctgcctcctgcagcatggcgtccagctcggacaagtccagttcgttctccgtaaccgtggtctgcatggcacactcctttgaatgggcgttcagggatttgccgcacgttcggcacttgtactgcgtcgtgccctgaccgagcgtagccccgtccgaacaggttacactgatggtcacgctctcgcagccttgcaatttcgcggcgtccgtcgcctgataatagttccgcgcgtcagaagctatataataggtataaccttcctcgttgtcgttgaactccgagagtcgggcgttaagcccggctttgaacgtgttcaggtccatcgagtaggaatcgaacacctcttcatagacgacctcttcccggttccagcttttcttcacatggatttcgtaggcgtatgccttcttcgtctgtttgccgccccggctgatgatatagccgttctgccagtagttgatactataggtatagccgtcattctggttgttgagctgctgtacccggcttctcgaccaaccggcgtaccgttccgaattggcgagcgcctgctcccgttgcgaggcattgggataaaagtcgggatcggttgtctcgaaacgcgtccattcgccgccgttcagtatgctgttatcgtccgtcggcgggtagtagtcgcacaaggcgatactcccttgctcacgccgggcgatataccaccgttgcgtgtagtagtttcccgccgtctcgtccagatagtccgtcatccaggaggtaaggtcgtagttgctgaaatcgaacagtcccgccacgttgtcctcaccgcccaccatgtcaatcagcaggccgccgaggtcatgctccgcctgctcgaagagcgcaccgtaatggtcatacaggtcgatgaccttgctgaccctgccgcccatcagctcatggaacgaactggtttgcaacagggcgtcaccaatgttcccgatacctgccgaggcgagaccgacacccatgttgtagaggttgtcgatgtcgtgttgcaggttctccttggtgaaattgcccggcacgctggcgatgtcgtccagcatgtgctgccagtcgatgtcgcctatctccgagagtttcaacagaggggcgatgttccggttgatttccagaaacacgatgtccgaaaagcccaacgtgctgttcgtcactacactctcgaactgcatacacaggcttttcgtttcgtcgcagattttcatcaggtagctgccccagtagatagccgtttgcggtgagcggagcatcagtttcgccaccacccatatcttgggtatgatcttctccgagaccatgcggtaaatgcggcggtagtagtagttctccgtactgctgttccagataccgaggtcggaaaaggctttatgctccaagaacttggaggcaaaaatccccgccgtggccacttccgccgcattgtagtgcttgagtatgtcatcgacctgctcccggtaatagctttccgccacggcttccgtaccgaaagcggtagccattgccgccacggtacgcgcatcgtagttcacgctgtaatactgcgcgtggatgtgctgtacgacaacgagcgacaggagcataaggataagtgacagccgtttcatcatggattcctccccggttaaaaacagcccccgtcaacggcgcgtcatgcctcttagtgcacgtatcagttcgtcggcctcatatacggcggaatttgccaccagacggtggtgtatgaatacctccttggctatctcgtacctgcgttgttcccacttcgcctcttcttcctcgtcctgcacggaatttccgataccggcgtattcgtccagttccttaccgggcattcccaaccggagattgtacctttccagaacatcctctatttcctcgatgctttttcttcccatgtcgcgtacccttaccaagtcctttccgggccattggcacaaatcccggatggttttgatgtcgaactcacggaatatccgttggatacgggcttcatatttgctcccgaactcaagtgtcttcacgctttggctgatgtctatcttttccattttctgtaattgatgatttgattgttattgttttacatgaaggttcaatatccgcccggcctcgttgaccttttgggcgaacggcagggattttccgataccgctggcgttccaatcccgacagtacgcctcgatagcttcctgatggctgcaccgcaattcccgcttgtagagtttcagggcttctttctccgcccgctcggtggtgtaggtcatgtaacactctcttggttcttccacgccgtacacgccgctggtcgtcccccggcggatgaacacctctcggaagaagctgcgcccttccttgttttccagccggttgatggtgaatatctttttgcagtccacgtcggtaagtccgagaatagccttgatttcatcgaaccgctcgcggaacttgctctggtcaagcagcatcaccacgtcggagttgttgatgatggcttccttgacgatagggctgccgatgatgtcctgtatctcctgcgtcaccacgccgaccgaggcccagaacttacgggccgtcttgtacataaacttgatgtattcggccatgagcgggctggcaatggccttccacgcttcctctatgaccaggactttgcggttcttcttgatacgcatcttctgtaagaatacatccatgataatcagtgtgacaagagggaacaggagaggatcatcctttatactgtcaatttcgaagacgatgaacgtctcatcgaacaatgaactgtccatgttctcgttcagcgtcttttcatgattgccgccccgatagaagtccttcatcatgtaacggtacgtcgatatgtcgatgcccgaaatatggttttcggcacagatgtcggggatgcgctgcacggaaaattcatagaacgagttgaacgacagctcttccactttcaactccttacggcggcgttccatctcgtcgatcatgcgctcgatacgcccggtccgctctccttcgtcctcgtcctgcttctcggcatggttacggtcgtcgatgagcagccccttacgcaaatcctcccgttgcaggggtgtgaagccgtcgaacccattgaaataagtgtcgtaatactccgtgatgacctgttctatcaggcggtcctctgtctttgtgaccgtaccctgcgagcctttccagatgagcagcacgaggtttttcaggaagcccgtcttctccacattcatttccgcccgattgatgcggaatgggttcatcgtaatcggtctttcctcggtataggaaatgtacttgccgccgaggtattcgcaaagtccctcgtagctgttacccgtatcgaccatcaccacgtccgttccttgctcgtacaactggcgcacgacagagttcatgtggaagctcttgccgctgcccgaaggaccgagacagaaaaagttcgagttgtccgtcagcttgtttttcccctcctttcccgtgatgtcgatagccaccggcacgccttggcggtctgtgtagtagattttcagcggtgtctcctcgctgtgctgtatgtgctccttatacatcagacacatcgccgcgtcacccagcgtcaggaagcggtcatagtcctcgttcatgccgtaacagttacccggaaacgagttcacgaacagttccagttggttgtacgcccttttggaaatatggatacccatacgtccgaaagcattctccaagtggttcgtgcatttttgcaggtccgtatcggccggtacggcgacgatcaggttgaaatgggtgtacacgagctgcttgctttcccgcgcgatgacctcctgcacccgcttgatgtcctccacggccatctggttgctcggattgggaatactggcgtgccggttcttctttttgtccagcagggccagttcccttttctggttgggcaggaagacaatctggttatagacgaccgtctccgcattcggaatgttgtcgatggcagccagcaggtccacgggcatatccgtgttattgacctctatattggtgtaaggccgtatcagtgagggcagtgcggcacagtccacatcgacaaggctatataccttgcagcgtttgtcgcccatcgagaccgtttcgtcgtccgccttgaagttggtcatcgacacgatccgctccttgaagttcatggcgaaatagcggtccacgtattcgctcgcttcggctttgttcaggaacctggcctgtaccccggcatcgtgcagctggtcatgcactttgcgtatcttgaccagaaagtcgcgccacttcttgttgtcgaacgagaacaggcggctcttcttcgcctcctgcgtgatggtcaggtaacacacgctgtccgtatagttacgccccttgaagtaacggaagtaggccgatgagaggaactcgtgtttgtcccccgtctcgttctcgaactgtttccggatgaagatgtcctgtttgtgcagggcatatccttcgccgagcgtctgcgcgagggcggtgaaaaggtgcgtgaactcgtagtagctgtcgatgttcgcacagtatttctgcacgggattctctattttcaggatggctgaatattcgcccgtcttggtgtacagcacgcccacgccgttcgtatcttccacagaaaaatagatgtcctgaaagatacgcttacgcttgcctccggtaccgaacgcatagaccgacagggccatgccggcacacaaggcgataaaaagtagaatgatgtacaaggtcatttcaaaatacaataaaaaaggccggtccacccggatttcaggcggccggcccgcgttcaacattcaacaagaccacacgttgcccgtgatggtttttcttttcttctcacagtttcttcgagtgggcgtagatatacactccgcgaccgtctttcttggtatgcagccctttccgctgtttgagcatgataagcgcaatacccgtcgagacgaccgcaaccagcacgaccagtccggccacgaaacccacgaggcagtaggcgatgataaatccgacgatggctccgccggcaacgcccgccgcccagtagatgtagcgtccctgaatacccatgaactccaaaggccgttgcaggcccttgaacagcgggtagtcgggatagcgttcgtccttgcctttcatcgtgcgggagggttatgcgccgataccgaagaacatcggaagtgcttgtgcggcagcgattaagaaaatacatgcgccaacgatcatcataatctttttcttcacgtcctgttcctcgttgttcatggcgatgtacaccgagatagcgcctacgatagccactacaccggcaatggcgtaacacagtttgaccatgacggggacgtacttggcgatttcctccgtcacggtcgccagtgcggtcgtaccggcggagtaatcgcctgcggagttttgggccatgacggccgtcgtgccacacagcaacatcagtgtgagcatctgtacctttttagcagaaaacattcttttcatttgtctttttgttttttgaaacatgattatttattttagggtaagtattgcagttctttcgaatcgttatggcggcacctcattcctgcatcccgtttctatatgcgatagccgaaaaaggcaggaaagacaaggaaggcaccgatcaggaacaggcacgcgcccacaagcgttacgacggacttggtaataccgtcctcgcccgtgttcatctttacgtaaatctggaatccggacacaatcacacaaatcccggcgatggcacaacagagagcttggacgtagaacatcatcgttaccacgtagtcgtgcatcgtcgccagcgcatccgccccccaactgtaattcacgctgccgcttttcgccagagccgaacaggggatgatggaacaaagcgcacatagtatcttcttcgttttcgacatcttacagcttatctttgaccggtctccatttcaggctgggacggttgtccaagcgtcctttggaaatcattgccttatacatctcttcgtcggtaaagccgtcggacaggtagggtgcgaccttttccatctgtgcctctgccttggctttcagccgttcgagccgatccttggctgttccatcttttttcccggtgtcgccgttttgggcggcaggcgaagcggcaggtacagtctccgtgccgtatgtttcatttccgattttgaacccggtctcgttctccgaaacctcgacactctcttccgtggaatccatcggaccgaggtcgaaaacttcctcgtcagtcttctccgttcccttctttccatacaggtcacggatgatattgaccgcgaaatagacgatgtacagcaccgtcagtacaagggcgaatataaagtatgaacccatctgtttttaagtatgaaattaaactttaattgaactttaaaagtacggttgcaaagaaaaatattatatttgatgtaacaaaaactctttatatcaaacagtattttattacatagaaataagtttgaaacactaaaattgaactttaatttcatactttgaggtatcgaagcagaaaaatcgggcataaaaaaagccctccgggaggagagctttcaagggaaagggtaacgatgatgccttaccgtttctttccgcgtaggtaatcgttcaggtccttgtattcgcgataacggggtgcttcgttgcgtacacgcccgccatacatgccggcgatggtctcttccgttttctgccctgcgagatcattgtcgagataacagtggatttcctcgtacacctgcaagtgttccaatgcttttttcaggttgttcaccgagttcatcacgaggtaatcacaaggtgcgtcgatgcagaccgtatcatcacccgcctgtttcagcgtcaggtaagagagaaaatccatgaagccctcgaacacgcaaacacggttctgtgtttcaccatgagattgcctgatgacagagatgtccttacaccggatacagcccttataataaggattgcgcacctcgtacccgcccgccgcgttgccgaaggcaagagcgaagtagcgccgtttacgtaattcataatggacctcccggcagaacatgcggccgatgtccccgtcgattccacgggaatgaaggtacgagagtagcgcatggtgctgcaacggcacgacgagcacgtccttcatgtcagcttcgacgggacggggtgttgtccccggaatccgcactctttgtatcggggcagcattttcatgtctcccgatacaggcaagcacttcgctcacgctgttcgtccggtacaggtatttgcccagttccacaaggtcgccgcccgtcgctgcgccaaagtcataccattcgttgagccggtcgttgaccttgaacgacggagtgcgttcatcgcgcagcggtgacagataccagtattgttttgatatcacactctggggatggtagccgagactggcgagatagtccacgatacgcagttgttttgcttccgctatggtcatgtcattttcttttcacttgttttcaaaaaacagtttactttggtttttctcctatatatacccggaccaaagtaaactaaattatttttcaccttccgcttcctcgcattcttcgtcgaaaagcagggcttcggtcggggtcacatcgtaataaaagagcttgtcccgtttgacgatcagcttcaggttttccgtcaggtattgcagcagttttatcatgacgctgcgtccccgtttgaacccgatagcctcataggaagccatgagggcctgcagcacgttctcgaaacctttgatgggcctgtccccgaaagcggcggaaagtgcctcccggtgctgttcgatggacaaatccatgaagctgctccgggctttcggtcttacactgccgtcaaacgaatagttatccaccatgaccggcaacccttcgtcatcaacggaaaaggcgaacggtttgaactccttctcgcggatatgcagcgcatgaacttcactgataacgggattctccgcacttttggtgatgaccagcaccgtttccgccttattgctcatttccgtaccgatatgcccgcgcacattgttgtcgcccttgttcaggtgtagcacacaatggatgtgcaggtcgtatttcgacgaccactccatcatcttgttgatgacctccaccgattcgctggtgctgttgatgtcgagcatcaggtcgcggatgccgtctatgatgaccagcccataccccttgttctgacgcagggcatagtcgataaccccgatacggacggcaggagtgtattcccgcaggcaaatgaaatcgagattctcgttgtccgtcgtggtgggcagccccgccaggcggagaatgcgttccaatacgttgtggcaatggaaacggctctgttcagtgtccacgtacagaatcctgcgtttgccttcgggcaggtgcgcccgatagttcaagacctgccggcccgccagcgacgcggcgacgatggccgagacgttgaacgtctttttcgccttcgccttacccgtcgaagcgctgaaattaccgagcgtcgctatggtggagttgtcaatccatataatctggggcggagtctcgtaggtgtccgtggcctttatttgcgatgcagtgaggatatccgacaggcggttctcgtccagctccgcccacgagttacggtcagttcttttttcgttttccatagcgcttctggttaaagaacggttgggttgcggacacttccgtcgccatacgcatggcatcgtccaccgtaggttcgtagttttgcaagagccacgcgtccagctcttccttcgcaaagtagagcatcttgccgcgaggcttgtagtgcgggatttccttgttcgatgtgagtttgtacaacatactttcggacacgccgatatacatgcacgcctcttgaaaagtgaagaccttcttggtcgtgtaaatggtattttccagcaaagccacacgctccaacagaccttccaccggttccaacttcttgagaaccgcttctatggcggtcagccgttcgctcaaccgctccatgaatgttgttctgttttgcataaaatacatgttaaaattagacaatggagagttacctccgttatgcagcgcgctaacggaggtcaaagttatgtgatgtgaaccggacagccggaaataccggcgtgatactatgcacgtatcacggcaactgtcactgttttatctttcacatacttggctttttggcacttcgtgtcatattttcagtcggctgacggcttttcgtatgccgaggtttgccgatgtaatgttgttcctcgccgcagacagggcggacgagaggcttgaagcggtaacgtatcttgtgccgtctttggacaacaggaaccgccccttgtcgagaaccgactgccagtgaggcaggatgaaggtgttttcgagcaacgcgtcgaacaggaccgccacatggcggatattgttcacacgtatgcagaagcccttcttgcaggcaaaaagcgcttccatgtcctcgatgcggagtgtggaaacgcaaaacagatgataagcgttggcgcaagccacaatacctgtcatctgttcacgggaaaaattacaaccgaaggagagaggtggatcgtttctggaatcttctatacgtgaagagccgaaccatactccggcaatgtcgtactttcgtttcaaggccatgcactcctcgaaagaaaatgtttctgcggtaaagaggcttttgacgagacttgtgcaatcgatcaacagccctctgatgatatggatgttcatttcatggcaattcctgcaaaccgcactgttgcagtcgatgtaccggtgactgtttataaagtcatccacatagcggccataccgtttgccgcctgccatgacgtcttgaagataaagctccctcgcttcggagagcaattcgtaaaattcttccgctacatcctgttccgtagcgaagtggtgcagatgtggtctcccttcaaaaaaagagaggacctgttgttttgtcctttcatgtcgaattgtttttatgggtttatacttattataatagtggcattacttcgactatttgaaaagtcggagaaaagccggaaatatttacctgtaaattgaatttgacatgtataactacatcagtcgaatagcccgttgaccaaattgactgcttcgtcttttttctggttgatgattttggcgtacacctgtgtcattctcacggaggtatgaccaagcagcttcgatacggtatagagatccgcaccgagcgtcagcatcatggtcgcgaatgtgtgccgggccgtgtgaaaagtaaaacgcttggtgattccggccgcttcggcccacggcttgagatactggttgatgtttgaaggcaagctgaacacatggtcatccgccgccttgtcctcacgctccggcatccacttcaacgcctcgttggagagtggcaggtaaatcggttctttggtcttctgcatagccaccgccagacggtattggccgttatcgacaaagacattcttccatttcaggccgacaatatcgctgatacgcagtccgcagaagcaggaaaacagataggcgtttttaaccctcccatcctgtaccggagtggcaatcaacgcccgtacctcttcgatggtcatataggaccgcacgctctccggcattttgggcttctccgatttttccatttcattaaacggatttctcaacaaccgtttagcccggacggcagtgttcagggcaccgttgaatatctgataataggtattgcgtgtagatgctgctatcggctttcctttagggcggaaggtcgtcagcatgtagtcgatatagccttggcaaaaagcgaggtcaacccgatccaacaaaaacctttcccctgcatattctttcaggatatgggtaacggccttgatttgaccgatgcctttcttgtcgcgtttctcttggtactccaaataggtttgcatccagtccagcagataaaccttatctgtatggttcacgataccggcttcgccgctggtcagttcgataatgcgtttcgacttgatggcattcgcagcggccattgttatttcattctgccgacgggtattgttgtccgttcccgggataagatacagcttcaggtactcatatgtccgcttgccattgcggtatatatccagatacagacttttgctgccatcggacaaatccttcatccgaagacggatgggctcttttacttttttaggcttctttattcgtggcataatcgtattctttcattcgttctttttcgtatgcaaatgtacgaattaaaaccgaaatcaagaaacaaacaaggaacaaaaatgtacccaaaaagaactaattaacagaaaatagcgaaaaaaactgaaagaaacgatttctttataaatgtctgatataaagcctatttgcttgtacttatttggattttattttcatctttaatatgtctgtttgtttattgaaaataaaaactatgaaatacaaaaaactcatttcttttctagctttctttttagcagtattgtctgtatatggacagaacccttttgtcttgaaatcaggcgaaccggtgactgttgcctgtggcaattcagaggaagaagttgtacatacagctttgaatttgctcaatcgtgatgtagagtctgtcttttctacccgcataattgttactccagaaagtaaaaaaggaatgattatagtcggaaccatcggacaaagtaatttgatcgataaggcaggggttgatttgtctcctataaaaaataaaaaagaagcttttctgctgaccgtttcttccaatggtaaattagttatagccggcagtgacaagcgtggtactgcatacggcgtcatggaactttcacggttgataggcgtttctccatgggagtggtgggcagatgcgacgcctgcaaagaaagagatttttcaactaccggcttcttatcggaatgtgcagtctccttctgtagagtatcggggaatttttatcaacgatgaggactgggggcttaccccttggagctggcagacatacgaaccaagtgatgtgaaaggacaaatcggtccgaaaacacatgagcggatttttgagttattgcttcgtctgcgtgccaataccttctggccggctatgcatggttgctctgtacctttttattttacaccgggcaataaagaagtggctgataagtttggtatttttataggtacttctcattgtgaaccgatgatgcggaataccaatggtgagtggaaacgggatggagtgggagagtatgactatgttcacaacagtgctcatgtcttgtctttttgggagcaacgcgtaaaggaggtggcagagttggataatctgtatactttaggtatgcgtggcgtacacgatggtgcgatgaatggtgctaagaccatagaagaacaaaaagctgttttgaccaaggtattgaaggaccagcgcgatttgttgactaaatatgtaaataaggatgtgacccaggtgcctcaagtctttattccttataaggaagttttggatgtataccatgccgggctgcaagtgcccgatgaagtgacgctgatgtggtgtgatgataattatggttatatccgtcatttccctacagcggaagagcgtgcccgtaagggaggaaacggagtgtattatcacgtgtcctattgggggcgtccgcatgattatctttggttgggaactgcccatccttccttggtataccagcaaatgtctttggcatgcgagcggggtatacagaaaatgtggatattgaatgtcggagatattaaaccggctgaatatcaggtagaacttttcctggatatggcatggaacttggaagcggtgaagcagcagggggttgctgcccatcaacgtcatttcctggagcgtgagtttggaaaaaatagggctgaccggttacagcccgtcatgcaggaagcttatcgtttggcttatatccgtaagccggaatttatggggaatacccgcacggaagagaaggatcctaagtttaaagtgatcagtgatttgccttggtgtgagcaggaaatcaatgaacgtctggccgcatacagacaattgtcagataaggtggagcaggaatggcatgcgcttcctgcacagaaaaaagaaacttattttcagttggtgaagtatcctgttcaggcggctgctcaaatgaataacaaattgctgacagcccagttggcgcgtcatggaaaggctgattgggcggatagtgacagggcgtatgacagtatagtttcattgacaaaaacctataacacaacaaaatggaaccgtatgatggatttccaaccacgcagacttctggttttcaaccgggtggaaagaaaagcactatcgtccgggctgcttgaaaaacctcaggcagtttatacatggaatggcgctgattgtgttgaaggggcatcggttatttgtgaagggctaggctatgaaggaaaggcggtagcggtggagaaaaagaaagaactgacttttgaatttgctgcatgggaaacggattctgtcgaggtggaagtacggttgttgcctaatcatccggtagaaggagaacggttgcgttttaccatttctttggatggaagtgccacggaggctgtttcgtatgaaactaaaggacgcagtgaagaatggaaggagaatgttttgtgtaatcaggctgttcgccggatgattcttcctgttgcacggaaagcttcccatcgtttaatttttaccgcattggatgaaggtgtggtattggatcagatatgcctttatatgcctcggataaaatagggtgaacaaagatattcaggatatttgtgcatacagaaattacaatgaaaaacaactgataaaatgaagaagacttttttaaaatccttggctggtattgcggccgtagcttttgccgtatcatgtacggcaccggctccaaagtataaaacggtagttgtcgatgctccttttgctatggaacccatcaaagaatgtgtttttcccgaacaagatttttccattgtggattatggtgcggtgaaaggtggggaaacagtgaatacggaagctatcgccaaagccatagcagcttgtaataaggccggaggaggtcgtgtggttgttcctgaaggggaatggctgacaggacctgttcattttaaaagtaatgtaaatcttcatttggaagaaaatgccatattacgctttacagataatccctctgattatctgcctgctgtgatgacttcatgggaaggtatggaatgttataactattctccgttgctgtatgctatggattgtgagaatattgctattaccggaaaagggacactggctcctatcatggatacttggaaaatctggttcaaacgtcctaaacctcacatggatgctttgaaagagttatatacgatggcttctaccgatgtacctgtagaacagcgtcagatggcaaaaggagaaaaccatcttcgtcctcatctgattcatttcaaccggtgtaaaaatgtgttgctggatgaattcaagattcgccagagtcctttttggacgatacatctttatatgtgtgatggtggtatcgtacgtaatttggatgtaaaggctcatggtcataataatgatggaattgacttggaaatgagccgtaacttcctgatagagaactgtgtgttcgatcagggagatgatgctgtggttataaaggcagggcgtaaccaggatgcatggcgtctgaatactccttgtgagaatattgtgatacgccattgtgatatcttgaaaggacatacgttactgggaatcggtagtgaaatgtctggtggtgtacggaatgtgtacatgcacaattgtacggctcccgattctgtattccgtcttttctttgccaaaaccaatcatcgtcgtggtggatttattgaaaatatctggatgaaaaatgtgaaggcgggaaagatgcaacgtgtactcgaagtggatacggatgtgctttaccagtggcgtgatttggtacctacctatcaggatagcattacattcatcaacggactttatatggatagtgtgacttgcgaccgtaccgaggctgtttatgatttgaaaggcgatgcccgccttcctatcaaaaacgtggaaataaggaatgtgactgtgggggaagtgacaaagtttgtgaagaatgtggtaaatgcggagaatgtggtggaggaaaatatagtttacaaggagaaacaagataaacaatgaaaacacaaaaaaaactatggagtgctttagcagctctgtgtgtggcaaccggtacggttgcccaaccggcctacaattattccaaactgcaaaaagagcagttggggcgtggcgttgtggccattcgtgaaaatccatcggacgtagtggtgtcgtggcgttacctgtcttccgatccgatcaatacttctttcaatgtatatagaaatggagagaaaatagcggaagtcccccattctacaggtactttttaccgggatacttactcaggtaatgaaaaagcggtatatactgtaaaaccggtgataaatggggttgaaacaggtaagttgaatggaaattatactttgccggctaatgctccgtcaggttatatcgatattcctctggacagaccggcggaaggtgtgactccttcgggacaaaaatacacctatagtcctaatgacgcatctataggtgatgtggacggcgacggtgaatatgaaattatcttgaagtgggacccctccaatgcacatgataatgcacatgacggttacaccggaaatgtttattttgactgttatcgtctgaccggagaaaaactatggcgtattgacctagggcataatgtccgtgccggagcacattatacccagtttatggtgtttgatttggatggagatggtaaagcagaagtagtcatgaagacttctgatggaacaaaggatggaaaaggaaagataataggtgatgccaaggctgattaccgtgaaccgggtatcacagacggaaattcccacgggaatacacctcgtaaccaaggacgtatcctgaccggtaacgaatacttaaccgtattcaacggactgacaggagaagcgatgaaaacaattgattatgttccggctcgtggtaagctgaccgactggggagacaaccgtgccaaccgcagtgaccgtttcctggcttgtgtagcttatctggatggagtacatcccagtgtggtgatgtgccgtggatattatacccgcactgtgctggcggcattcgactgggatggcaagaacttgaaacagcactgggtgttcgacagcaataattcggggtgtgaagactatgccgggcagggtaaccataatcttcgtgtaggcgatgtggacggtgacggatgtgatgaaataatgtatggttcttgtgccattgatcatgatggaaaaggattgtattctacccgtatggggcatggagacgctatgcatctgacacaatttgctcccagattaaaaggcttgcaggtttgggattgtcatgaaaataagaaagatggttccactttccgtaatgcggctacgggtgaagtgctgtttcaggtgaaaagtagtatagatgtaggccggtgtatggctgctgatgttgatccgcgcaatccgggagtggagatgtggtcatccgattcaaaaggagtacgtaatataaaaggtgaagtgattcgtcctgacctcaagagcttttcagtcaatatggctgtatggtgggatggagatttgcttcgtgagttgctggataaaaacaggataaccaagtatgattgggaagacgatgtatgtcgtccgttaatgatatttgatggaacggattcaaataatggtacgaagtcccatccttgtttgctgggagatataataggtgattggcgtgaggaggtgctgctccgtacggaagataattcggcacttcgtctgtatgtgtcgcggataccgactgaataccgttttcatactttcttggaagatccggtgtatcgtatcagtatcgctactcaaaatgtggcatacaaccagcctacccagcctggtttttatttcggaccggacttgaaagaggggatatttagaggttatgaatttaaaaatgaataaagactatataccatgaatctgaaaacattaagcatgatgggcgctctgttgctgctggctggaacgggtgcgaatgcgcaaaagaagaaagaagtactgaatgattcgaatacgccgttacatttgttgcaacctgcatacaaagtgccttacggtatgctcactacagaggagataaaggccgatatggatcgtgtccttcgttatttggaaaagaatactccgactcgtgtcgttgataagaatacaggtaaggttattacggattatgccaatatgacggctgatgcacagctggaacgaggtgctttccgtttggcaagttatgaatggggggtgacttattcagctatgttggctgctgctgaggctacgggggatcaggcttattataaatatgtaacagatcgttttcagtttctggccgaggttgctccgcacttccgtaaggtattggaaaagtatggaactgtagatccgcagatgaaacaaattctgactcctcatgcattggatgatgccggggcggtgtgcgcggctatggtcaaggtgcagatgaaggaaaattcaccggaacttaagccgttgattgataattatatggattttattgtgaataaggagtatcgtcttgctgatggaacatttgcccgtacccgtccacaacataatacgctgtggttggacgatatgtttatgggtattccgccggtagcttggtattcatgtattgccggtgataaaaagcaaatgtatttgagcgaagctgtacgtcagatatttcaatttgcagaccgtatgtgggtacccgggaaaaaccttttccgtcatggatgggtggaaggtatgcaggatcatcctgctttccattggggacgtgccaatggttgggcgttgttgactatgtgtgaggtattggatgtgttgccggaggattatcctcagcgcgataaaattctggagttgttccgtgctcatgtacgtggtcttgctgcctgccagagtggtgaaggtttctggcatcagttgctggatcgtaacgattcttatctggaaacctcggccacggctatttatgtatattgctttgcccatgctatcaataaaggatggattgacgctatggcatacggtccggtggcacagttgggatggcatgccgttaccacccaaatcaatgcggaaggtcaggtggacggaacttgtgtaggtacaggtatggcttttgatccggctttttattattatcgtccggtcaatgtgtatgctgcccacggctatggaccggtactttgggcgggtgctgagatgattaatttgctgaacaagcagcatcctaaaatgaatgatagtgccgtgcaatattaccgtacggaacaaaagacttccgaaccaattttccatgtaatggatggagaaactaaataagtaaaaacaaggactttataaaaaggaggaaaataccatgaaacgtgaagcttttaaaatgttcttgaagccgggcttcgagaaagagtatgagaagagacatgcagccatttggccggaattaaaaaaaatgttgtccgatggaggagtatatgattactccatttattgggacaaggatacaaatattctgtttgcttgtcagaaaactaaaggagaggagtcttcgcaagatatgggagccaatcctatcgtgcagaaatggtgggactatatggcggatatcatggaagtgaatccggataactctccggttactattccgctgcccgaggtcttccatatggattaaaataaaaaagagtgtatcgattcattctgatacactctttttttatacctttgcaagacaaaaacactgtgataaatgatatgaaaaaacacatctatgctctatgggcattctttattcttttcagtcagagtattgccgcatcagtcgaggtgcgttctactcatatgactacgggagatggggtcgccaataactcaattcggtatatatatcaggatagcaaaggttttatttggatgggaacgctgaatggacttagtcgttatgacgggaattcgtttgtgacttatcgtcctgagggtggaaataaaatttcgttgatagaccatcggattcgcgatttggaagaagataaaaatggtttcttatggattgcgacttctgccgagttgtttagttgttatgatctgaagaaagattgttttgttgattttaccggttgtggggaatatgagcaactgtatagttacaagatgactgaccgtgaaggtaatgtctggttgtggcaggatggaaacgggtgtcgtaaagtgacttatatgaatggtgaatttacatctgtggttttcaagaaagaaaacaataatctcccttctaataatattacttatatatctgaggatgagcaaggaagaatatggattggtagccatgacggtatagctcaagtggtagggaacaaggcagtattggtggaagaaaatcatgatgccttcaagatgatgtcttttggtaaagatgttttttttctttcgggaacaggaacaatttcgttgaagagagaaggagaggatagccgtattgttacccgtttaggtgaaggtagtaaagtatatagtaccatgcgcttgcaaaacgattggatcgtttttacggaagatggcagttatgtctttaatttgagaactcatcaggtgagccgggatacggaactgaatatagcaagaggacaagttcagattgacaaccgggggaatttctggatttataatcatacaggtaaggtatggtatgtcaacgccaagaccagatttgtcaagtctttccaactgattccggctgataaagtaaattatatagatgaggaacgttaccacatcgttcatgattctcgtgatattgtttggatttccacttatggtaacggtttgtttgcttatgatttggcaactgatgaattgcagcatttcgaatccaatattaatggattcagtcatatcacttcaaatttcttgcaatatattatggaggatcgagccggtggtatttgggtcagttcggaatatacgggtatttctcgtctttcggtcttgaatgaaggagctgagcgtgtttttcctgaagatgaaactttatcagaccgttcaaataccgtgcgtatgatcaaccgtatgcctgatgataagatttggctggggacccgtcgtggaggattgtatatttatgaccctcatttgaaaacgatagagagcagtcgttattttgattctaacatttatgctgttgaggaaggggctgatggtagtatttggttgggtagccgtggaaacggattaagtattgacgggaaatggtacacttatcactcgaatgatcctctgtctattgggaataataatatttttactctttaccgggaccggaagaatagaatgtggataggtacttttggcggtggattgaatttggcggtgaaggaaaaggataagtatgtattcaagcggtttttgaacaatttttatagccagcgccagattcgtgtgatacaggaagacaataatggatggatatgggtgggcaccagtgccggagtttacatatttaatcctgattcgttaatgaatgacccggataactatattacttataattataataacggtaagttacgtagtaatgaaataaaatgtatccatcaagatagtaaaggccggatatgggtaggtacttcaggaaaaggcttcagtatgtgtatgccagaaggtgattacagaaacttgacttttgagcattatgatggaagtgacgggttggtaaacagtatggtgcaatctattgttgaagacagggagggtaagctttgggttgcaacggaatatggtatttctcgttttgatccggatacacatgcctttgaaaatttctttttctcggcatatgcgttggggaatgtctatagtgagaacagtggttgtgtgagtaaggatggcaaactgatgtttggttctaattatggattggttgttatcactcccggcaaaattgtgaataattccactgtaactcctatggcagcttttaccaatcttcgaattaatggtattgccatgcgcccgggcgatgtggattctccgttagaccgttcgttgatttatacagatgaaatcgagttgaaatattttcaaaattcttttgtcatagatttctctacatttgattattccggaacgaatagtactaaatatacgtatcggttggataattatgataaagagtggagtataccgtcttcgttgaattttgcagcttataagaacctggcacccggtacttataaattgcgggtgaaagcttgcaatggggtcggtgtgtggggagataaagaaacggttttgaagattattgttgttcctcctttttggaaaactacttgggctttctttatttatgctattttgataggggtggcgctatatatcactttcagactgatgcgtgactttaatactttgcgtaatcgtatacaggtggagaaacagctgacagagtataaattagtttttttcacgaatatctctcatgagttccgtactcccttgactttgatacaaggagcattggaaaagatgcagcgtggtggtaaaatccctaaagaaatggcttattcattgaaggtcatggataaaagcactcagcgtatgttgcgtcttatcaatcagttgctggaattccgtaagatgcagaataataaactggccctttctttggaggaaacggatgttatggctttcttgtatgaaatcttcttgagtttcaatgatgctgctgagtctaagaatatggatttcaagttcttgccatctgtagcttcttataagatgtttatcgataagggttatttggacaaagtgacttataatttgttgtctaatgctttcaaatatacacccagcggtggaaaagtgactttttccgtgacggtggatgaaacaaagaaacagttggtcatatcggtagccgattccggtgtaggcattcctaaagagaaacgtaatgagttatttaagcgttttatgcaaagtagcttttcgggtagtagtgtcggagtcggcctgcatttgacacatgaactggtgtgtgtacataaaggtacgatagtatatactgaaaatgaaggtggtgggtctatatttacggtcagtttgcctactgatatttctgtttatgaggaaaaagattttctgattccccataatgtgttgttggaagaggaggaagtacatcatgcagctgttcttgcagaagaaatatcggcgcaagaagggggcgtggaacttccatctgcaccacttaataagcgtaaagtacttattatagaagatgataacgatgtacgtgagtttttgaaagaagaagtgggacaatattttgaagttgtggccgaggcggatggtccgtctggattggaacgtgcacgtacgtatgatgctgatttgataatctgtgatgtgctgatgccggggatgacaggatttgaggtaacccgaaaattgaagaatgattttgatacaagtcatatacctattattttattgacagctatgagttctgccgaaagtcatttggaaggcgtggaaagtggtgcggatgcatatattactaagccttttagcccgaaactactgttggcacgcgctttcaaactaatagagcaacgtgagaaattacgtgagaaattttcgaatgatccgaatatggtacgaccggctatttgtacctctgataaggataaagaatttgctgacagattacagatggttatggatcaacagattggtaatgctcagtttacgattgatgagtttgcttcgatgatgggattgggacgaaccgttttttatcgtaaggtacgtggggtgacgggatattcacccaatgaatatatccggattattcgtatgaagaaagcggcggaactgttgttggaaaatcgttatacggtagccgaagtttcttataaagtaggtattaatgatccgttctattttagtaaatgttttaagcaacaattcggtgtggcaccttctgtttatttacgtggaaaggaagagtccgggatacaggaaacagaaaataaggaatgatgaaaacaagattttaaataagaaggtcaatcgagaatgatatagaatcggttgacctttttgttttaatagactatatatttagtatggtttgagactgatttttgtcagtactttgcgacttacaatatagagtatccatgtacaagcagaagcggtgagtaatgctgctatttgttgagtggtatcagatatatctagaggcagagacgctccgagccaccaacctgccaaggctgcggtaacagtaagtaaggccataatgatgcttactcctaaaatgaacattattcttttcataaatggtttaagtttgattcaatattaaatataaatgctatttcaagtctgtttgttcatgattatataaaaaatcgtggtaaaggggatgtaaattaaaaaaggagtattctcgggaagagaatactccttttttatgtaggaatgataaatcttactgattaactcttttttcctgaattctagctttcttgccagtaagagcacgtaaatagtacaatttagcacgacgaactttaccaactttattaacagtgatactgtcgatagccggagattcgatagggaaaatacgttcaacacctacagttccagacattttacgaacggtgaaacgttttttgtcaccatgtccagcgattttgataacaacaccacggtacaactgtacacgttccttgctaccttcaacgatacggtatgccactgtaatagtatcaccagctttgaatgaaggatgctgtttgccagtagcaaatgcttcttcagcaattttaattaaatccattttttttgattttaaattgtttatcgttaccaacgcaacatatcaagtaactcttctttgacagcgattgcgcgaaagcggtgcaaaattactagatttttgtcatacagccaaattaaattcaactatttttcatctgatatcgttggttgcaacttcttttttaactacatttgggcaataaacaactaataaacatgaaaccaaaccgaattatgtgtatcattccggcaggaatagtagccgggatttttatgttttcaagctgtcattcaggctattctctggcgtcagttgagggaagcaggatagaagtgacagcagctttggatgctaatccggattccgctgcaatcgctgttttggctccgtatcaaaaaacggttgatagtattatgtcaccggtcataggacaaagcgctcgttttatggatcgctttcgtcctgaaagtgagttatccaacttggtagcggatattttacgttattctgcttctgcatatataggccgtatggccgacgtgggggtgacgaatatggggggactacgtacggctttgcccgagggggatataacttacggtaatatttatgaaataactccctttgaaaatacattgtgcattgttactatgaatggggttttgctgcgtgaactttttgaaaatatagcagctgtgcatggtgagggattaagtggcgcttgtcttgaaatttctggagatggaaaattattggatgctacagtggccggaaaagaaattgaagactctaaagagtataaagtagccaccttggattatttggctgagggaaatgaccatatgactgcttttgccaaagtgggcgatgcggataaattgctgcctgaaaaggccacagtgcgtcagttgtttctgaactatgtgaatgagcagactaaagcagggaagaaaatagactcaaagatagaaggaagaattaccgttaaagaataaactgaaccgtcatgaaacgaatatatgtattatttactgctttgtgtgtatgttgtgcgctggcagcacaggatatcaaagaacttttgatacttcatactaatgatacccacagccgtgtggaacctatccccattactgatccgaatccggagtttgcaggaaaagcgggttttgtacgtcgtgttaccttaataaaagaaatacggaaacaggataaggatttgttattgtttgattgtggtgacttttcacaaggctctcctttttataatatgtttggtggtgaagttgaagtgaagctgatgaatgaaatgggatatgatgccgggattattggaaatcatgagtttgatttgggcttggataatatggcacgtctttttaaaatggcggattttcctgttgtttgtgctaattatggtgtacagggaactgttttggaggggcttgtcaaaccgtatgttattttggaacgtaaggggataaaggtaggtgtgttcggactgagtcctgcattggaggggctagtacaggcaaaaaactgtgaaggagtggtttttgaaaatccaatagaggctgctcagcgtgtggcggatatattgaagaatcgggaaaaatgtgatttagtggtttgtttgtctcatttagggtggcaaggaaaaccttattctgatgaaactttgattcttaatactcgtaatattgatattgtcttgggaggtcattcgcattcttattttgataagactttgttttataagaatttggatggcaaggagatttcattgcaacaaatgggaaaaaatgctgtttatgtgggaaaaatgaaagtaaggatggaaaagaactgatagttgctgttgtataaggaaatctgatataattgaagaaattagatgaagagaaacgtattgttatttataagtttatgtgtcgtcggatgtgtgatgacgtatgcacagcagatgcctgggctgttacaaaaggggaaggcggatactcaggattgtaaggcatgggtggatgaacagctttctgaaatgagtttgaaggaaaagataggacaactgtttatacacacagtggctcctcttcagacacagcgaaataaaaacaatatatatgcagctataaaagaatataaagtaggaggattacttttttcgggcggtcagttgtctgatcaggttttattgactaattatgcgcagagtctggcggaagtgcctttgctcataacttttgatggtgaatgggggctggctatgcgcttgaagggaacccctcgttttccaagaaacagagtcttgggatgtatacaggataatgaactgctttatgaatatggtaaggaagtagcccggcaatgtaaggagataggtgtgcagatcaattttgctccggtggccgatgtagatgttaatcctcggaatccggttattaatacccgttcttttggtggtgatcctcggaatgtggctcaaaaagtggtagcttatgctcgtggtttggaggatggaggggtattgtctgtctgtaaacattttccgggacatggagatacggaagtggattctcataaggcgttaccggttttgaattttgatcgtgcgcgtttggacagcattgagctttttccgtttaaagaggctgttaaagcaggattgggaggtatgatggtaggacatttggaggtacctgaattgggtaaaaatccggcttcgatttcttcacatattatttataatctgctttgtcgggaattgggctttcaaggcttggtttttacagatgctttggagatgaaaggtatttcgcaaaatgagaatatatgcgctcaagccttgatagcaggtaatgatttattattggctcctcgtaatttgaagagagaattggatggtgttttaaatgctgtaaaaagtggaaaactatcagaagaactgattacggaaaaatgtcgtaaggtattgacttataaatatgttttagggttgaagaataaacctcacatccaactttctgggctggagaaacgattgaaccgtccggaaacgaaggagttgattctccgcttgcagaaagctgctataacggttcctgccaatgtaaatggaatcttgcccttggattcaaaattgaggggaacggtggttctgaatattgggaaaactcccggtgctgggcttgctttttataatcgtttgcaaaatacactttctctcacacgtgttgttgctcgtccggattcgatggaagctatcagaaaacgattgttgggtagtcagcgtgtaattgtggtggttacttcggatgattacaaaaagtataaaacaatgcttgattcgcttccggctgatttgcctgttatttatgtgtttctgatgccattaaagtctatgttggatatggagggctattggaagaaagcagcggctgtagtattggggcatactgatgaatctgttattcaggagtatgtggctgatgtcttggtaggaaaggcagtggcagacgggcgtttgtcggtggctgtcgccgatttgttcaaaccgggtgatggagtgactataactcctaaagtgtctcgtatttatagacctgaggattatggtatggattccaaaatactggaaaagatagacaggatagccatggaaggaatcaaggcgaaggcttatcctggttgtcagattctaattttaaaagatgggaaaccagtatatgataagtctttcggcactttcacttatgaaagtgaccgaaaggtggaaaaggatgatttgtatgatttggcttcgttaaccaagaccacggcgacgctgttggctgttatgaaactttacgatgaaggaaaatttggtttgaccgatcgcatatctcaatacattccagctttaaaaggtacggacaaggaacgtgtcactattgaggagttacttttacatcagtcgggcattcctgctttttggcctttttataaggagactatagataaagacagttataaggggagtttttacagagcaagaccggacgctagtcatcatacgcaaatagatacacggctgtatgtcattgataagtttgattatagaaaagagttgatggcaaaaactttctctgctgattatcctttacaggtagctgacagtatgtttcttcatcgttcttttcgtgattccattatggtacaaataggacgtattccattaaaagacaggagatatcgttacagttgcctgaactttatgttattgaaagaaatggtagagaatatcagtaaaatgcctatgaatctttttttagataaggaattctataaaccgatggagatgaaccgtacggcttatttgccgcttcggcagttcaaaaaggaggaaattgttcctacagtgaaagcggattatttgcgtaaaggaaaagtgttgcagggttatgtacacgatgaatcagctgctttcatgggaggggtatcaggaaatgccggtttattttccacggctcgtgatgtggcaaaagtgtatcagttattgattgatggaggggtttataatggaaagcgttatctgagtagggaaacttgtgatttatttttaacccatacctcaaaaatcagtaggagaggattgggatttgacaaaccggatgtgaataatagtgtgaaaagtccgtgtgcggaggaagcgcccgaagaggtgataggacatactggttttaccggaacttgcgcttgggcagatccgaaaaatcatttggtttttgtttttctgagtaatcggatttatccgcgtccttttgaccataaacagttgatgcggttaaatatccgtcctcgtatgcaacaggttatgtatcaggctttgatgaaatgatcatatttagattaaatacaaattagtgcatttttgtaatctctatgtgacaactaatagagaaaagctgtatatttgctccatcaattagtactaataatttaataattaacgaaaatggcttacgtaattagtgacgattgtatcgcttgcggtacttgtatcgatgaatgcccggtagaagcaatttctgaaggcgataagtattctatcaatccggatctgtgtacagagtgcggaacttgtgctgatgcttgtccttctgaagctattcaccttggctaagcagtacaattttgttctttaaagttaataacgatcgtttccgttgatggaaacggtcgtttttttgtttatctaaattttgttttgattggaagctcgtatgtctgctttatgaataaaaaaacaggcatcacagaaaaaaacggatgcctgttctttttatagagaaagaatattttattttaatagggctaatgcttctttgatgcggcgcatagcttctataatattctcatcggaagttgcataactcatacggatgcattcgggggaaccgaatgaagtaccacctacacatgccacatgacctacttcaagcagatacattgctaaatcgtcagcgttattgatgttgcggtcacctgctgatttgccaaaaaaggaatcacatttcgggaataaatagaatgctccttgaggattgtttacttcaaatcctggaatttcttttgctaattttacaataaggtcacggcggcgctggaatgcttggcgcatttcctctacgggagcctgagtacctgtataggcagcttcggcagctttctgagaaacagagcacggacctgaggtatattgtccttgcagcttatttacagcttttacaatccattccggaccggcaatgaacccgattctccatcctgtcatagcatatgcttttgaaactccgtttacaataattacattgtcatgaatctcagggaattgggcaatgctttcatgtttgccactgtatgtgatatgttcgtaaatctcatcggctataacatatacttgcgggtgctttgccaaaacagcggccaagccggccaactcttctttggtataaacggaaccggtgggatttgacggtgagcaaagaatcaatgctttggttttaggagtaatcgctgcttctagttgtgcaggggtgattttgaaatcctgatcaatacccgcagtgataataacaggagttccgtctgctagttttaccatttcaggatagcttacccaatagggagcagggactattacttcgtcaccgtcgttaactagagccataatcgtattacaaacagattgcttggcaccgtttgcacaggagatttgtgcagctgtatagtctaatccgttttcattcttcagtttggctacgattgcattgcgaagtgcaggatatcccggaactggagaatatctggaaaagttatcatctactgccttttttgctgcttctttgatgtggtccggggtattgaagtccggttcacctacgcttaaattaatgacatcaactccttgggcttttaactcattacttttttgggacatggccaatgttgctgaaggagacaaacgattcagacgatctgataattgattcattgctattattttttaatgtgtttaagtttacttgctgcaaaataaaggataatatcttaattatgaaagtaaaacagacgaaatcgcataaaaaatgatgtgatttcgtctgagttatagcttttttatttgttaaagtgcaatgtgtgtcccattctgtcttttttggtttttaaataacgctcgttatatttgttaggcgtgatttcaatgggaacgttttcaactatggacaaaccgtatgattccaatcctacacgtttgacaggattatttgtcagcaaacgcatttgggtgacgcctatactgcgtagtatctgtgctccgactccgtaatcacgttcatctgcctgatgccctaaaaggatatttgcttctacagtatccacaccattttcttgcaatttgtaggctttcatcttttccattagtcctatgcctcttccttcttggtttaagtaaacaacagcaccttttccttctttttcgatcatttgcaatgctttgtgcagttgttctccacagtcacaacgcatggatccgaaaatatcaccggtggcgcaagaagaatgtacgcgtaccaaaacgggttctccttcttttatgtcaccttttataatagcgatatgttctaaaccattgcttttctggcggaaaggtatcagacggaaatggccgtattcagtcggcatgtccacttccacccctttttctactaatgactcttgcttcagacgataggcgatcaagtcacggattgaaattagtttcagcccccattcatcggccatttttcttagttcgggcagacgtgccatggttccgtcctcactcatgatttccatcagtgcggcggcagggtatagtcctgccagacgcgccatgtcgatacaggcttctgtatggcctgcacgtctcagcacccctttgtcttgtgcatataatggattgacatgccccggacgtccgaatgtttcgggagtggaggtgggatcggcaagagcacggatggtagcggcccggtcgtggatagaaactccggtactgcaaccttccagcttatctacagttacagtgaaaggagtacctagaactgacgtgtttgtatctacttgatgaggtaattccaattctttgcaacgagaaatggtaataggtgcacaaagcacgccacgtgcatgtttcaacatgaaattgacttgttcgggagtaattttttccgcagcaacaattaaatcgccttcattttcacgatcttcgtcgtccactacaatgacaaacttaccttcacggaagtcagctatcgcttcttcgatggtatttagttttaattcttccatagtcaaattataaatgatttattgtttattctttcttgaatttcacggttggtcttgattatgttttttaaatctttatccagccggatactgaaccgccaaatgcggaaatagaagaacaggcctattggtacaatgattcctgcaagtaaattaagccattggttgtcaaacggacttttgtgagctttggtggacaaaatgggatatttatttaagtattccagtaatactccatctttgctgttggataattcttctatgagtagttccattttggcactgatatcggctatgacgtcgtcatgtcctttattggcgaagatgcggatataattaggtgcatcggccagtctatgcttgatggcatattcgttacagatgttgcatagtttctccaattccgtttgtatacgtggatagtccggatcttctataataacttcttttttgaatacatggcgcgaggggcgcagacctagcagcatacggaagaaattgatatacacttcggcattgaataccacagagtcattatttgacttataagtaaagaaggctccgataggtgccaatacaatggtactcatccacacgcccaataccatattcatttcaccgctttttgctactcgggtagctccggaatcaatgatataataaattacgaaaattaagacggataccactacgggcattcctaaacctcctttgcggatgatggctcccaaaggcgcaccgatgaaaaagaaaatcaaacaactgagagagagggtgatttttttgtgccagtcggcttcgtgtttccggatattgttgtccgcatctgtagtttgatagcttttcatgctccattcgctggccagtgcctcggtacgatccgccgcactacccagtgtcttatctttttcagctaaagtataggaattgaacaggctgtccacattgattttgttgtttgtttcaactatttttgcggagtctgttttcgataatacgatattgcgataagtcgaggcttttatttcattatacatacttcttcccaagctgtcggcacggtggttcagtgagtcgatggactggctgatttcaatcatgtttttgctgtccgaacggtcacttaaaaagcttccatctaccatgttgaatccaccgtcaaattcgataatggtatgtttctctctgaaggtttcacgtcgataggggacattattggatgaaatggtctgcgatttcagattttcgaactgttctccgttatacagatgtagataaagatgttgtttgtctgctgtcatctccatttttccttcggaagcccatataatgtgagcgttttcaaacccatctgaaaagttgtagatcagtacatcttttagcattcctgtttcacggtctttctgttttacatatatattatacccctcaatttcgtcgtaaaatacaccttccggaatatccagttctggtgaagtttgcttcatggatacaagtaaagtaagcagtttgatctgcgctttgggagctatgacattttgaaaataaaacgaggtacaacacaggaaagtacaaaaaataatcagtggacgtatgatcctcaataagggaatacccgctgctttcattgacagcaattcatatctttcaccaaagttaccgaatgtcattaaggcagctaataaaattgccaaaggtagggacaaaggtattaaggtcagagcagaataaaagaagaattgtgctaaaacactcatttccaatccttttccaaccaactcgtctacatatctccataaaaattgcatcatgaagatgaagagacagatgaaaaaagtacctataaagagcatcaaaaagctctttaggataaatatatctaatttttttatgcgtagcattatttcattttgtgcaactatcaaggcacaaaaatagcataaaaaacggagagcaaagacaagttttgcatatttttatagaattacagtccacttaccctttttagcttctctatttcggaatcccaaagttctttcgtatcttctacttcatcgggggctgcccagtcaatcacttccagcatatagtcagaggttagttcgttatagaccattttcaattcaaaataggctttaggatcttcatcatccagccatcgaaagcgtataaaactgttaacccggaagtttgtaacttcagcttgccgtgtttctgtttttccccaataaaaggtgaatactttgtctttgaatatcaccttgtctgcaaaccatgtttccaggccggatggagtactgataatagaccatacgatgttaccggatccggctttcaacatgtactccaagcgaattttttcttttctcataggttagctttttaaagtttcggtggcaaattaagccaaattttcttatttgccataataaatgctatgttttttgaaatatttattagccatatactaagctgtttttctcttaaaaaacgaattttacaagaaaaagttctctgaaatgttgcaaaattcaaaataactttctatctttgcacccgcaattgagaaatgatggcgggatagctcagctggttagagcgcatgattcataatcatgaggtccccagttcaatcctgggtcccgctacaatgaacaattttagactgttgagaggcttccactcttggcggtctttttaaaaaacgatggcgggatagctcagctggttagagcgcatgattcataatcatgaggtccccggttcaatcccgggtcccgctacacaaaacaaggtatttatgaatttgtttcatggatatcttgtttctcttttatttatattggacttatttttcttttcatatagaatcacatttgaataattttatgtagatttgtagatacaaatcaatcaaagttgtagtttttgctgaattatgaaaaacgcatcctatatggaagggaatttgtggttatatagattatattttagggtggtaattttattatggctacctgtatccttatcggccgttgaccttccgaatttaacttttcgtactattactatttcagacggcctgtctaacaatattattaatactatttataaagataaaagaggctttatttggttgggtacccagaccggattagatcgttttgacggtatcaatgtgaaaagttttcttcagttttcaggacgtaccattttttccatagccgaaacagattctgtttatttgtgggtgggtacagataaaggattatggaaactcgataggaaaacagaccaagtggaatcggtcactttagatacaaaatcgttggaagttagatcagtctttgtaagccagacaggtcgattgctggttggaaccactcatggactttttatctatcaagagagtgctttcaggaaggtgcttttcgggtcaaatgctttgtcttctatcaattttatcactggcattgttgaaggatataaagatactttttggctgacttcacaaggtggtttgattgaatataatattgaaaccggtcaatcgaaagtctatacatatcaggatgatgagaaatttgttagttatttttcctgtctggctcttttaaaagaaaagctatatttaggaacggccggcagtggtatgcttgtttttgatatcggtaaggcggctttttctatttgtcctgaagtggaaaatggatatataaaaagtatcattactgttaatgatgagatatgggtgggaacaaatggaagcggtattagaataatcagtgcgtctacaggaaaagagttatcggctatagagcatacttcgaatgcggatgctatttgttctaatgcagtttattctttattgaaagaggatgatatgctttgggtaggtacttacatgggcggattaagttatactccagctcatggaagtttcttttctgtttattcttatccagagctttttaattcttataatatgaatgtacgtgctttttgggtggatgcagatgggaaaaaagtaataggcactcgtgacggactttattatatttctgaaacggaacaaaggataaggcattatacacatcggaattccattttgcgttcggatataattttgtctgtaaaacctttcaatcgggattttttaattggaacgtatggagggggcttgtacttgcttcacaggaatacgggtgaactttccttttttcaatcagatcaatgttttatgcaagggtcatttaatggatatgaaagggatggaaacaataaattatggatcggcagttccaaaggtgtgtatgtatatgatcatttgacaggggaatatgaggtttataacagtcgtaattcttctttgtcagttaattctgttttttcattgaaggcagattcgaagggcaggatgtggctgggcacaggaggggccgtttttatgtatgatagggctgctggggtatttaaatcggatgtttttccggagcatgttttaccatatactaaaagtgtacgattcatttatgaggataaaaagaagaatttgtggttttgtgatgataaggagggggtggttaaggtagatgagtcttttacgacatttgaacacatcacgatcgatgatttcttaccgaataattctgtgatgagcatagtggaagatcctaagaacggcggattatggtttgctactcagagggggttactatatataaaggaagaggaaaattatcataagattttttcgttatacgatggcattcccggatatatttttaattctccggtacagataacggatgataatacaatttggtggggaaatgaatgcggattggtctgttatgatgcggcaaagagctggagtgagataggaacaaaagaggtccagcctcccgtgattacttccatttcagtcgcaggcagacctttgtgcccgggagagacattaatgcccgtttctgctccatttatagatgaggtgtttctgtctgtaaatgataataatatttcattcactttctcagccttgaattatgcagtggagaatacggatttatacgagtattgtttggaagaatatgataaggaatggaaaactttgatgaaaggaaatcaggtttcttatacagaacttcctgttggcgattatatgtttagggtcagggcggcttccaatcctgcagcaataaaagcggtaagggtggttgttgccggaaatacgccttttataagatggattgtggtgttaagtgtagtcgtttgttgtattcttatttatttttactccgggttattggggaagtatcgcacaatgaaggaatatataaataaaaagacggaatcatccgaagaaaatcggaaagaaaaatatcaaaaatcaaggatggaagagaaaacggccatgctcattattgggaaactgaatgagtgtatggagaaagatcggttatatttgaatcctgatttaaagttgcaggatgtggcaaaagtggtgaaatgtaatactggagagttgtcccaagtgttgaatatgtttatgaatattggtttcacggattatgttaataaatataggatagacgaattcataaaaagaatacaggataagtctgcttccagatataccttggtttctttgtcggaacaatgtggtttcagttctcgtacttcttttttccgttcgtttaagaagtttaagggaatgtcacctgccgaatatataaaggaacatgggatatttattgagtagcgtttggaatagaggcgttactctagtgattggatagaagaagagagttccatatttttttggaactctcttcttctattatgcaatttgttgattcatagtgttgtatgatcttttttgtctcatttagtaggttgggattaatcctgctttacagaatggttgaaaagacatttcagtttctaattttgctgatagaaaaatatttttatccattaaagaaactgatatgattatgaaaagcagaactttttttattcttgtttttatctttttagttagcctaggatgtttttcgtgtaaaacgactgctactgatgatttttctattgattcggaaattgcgtattgccggtctcaggctatgcggacgctggtttctattccttcgttagataaaattcctaattccatggatttagatagtattaaatggcgttatacacaggtaggctcttggacttgtggattttggcccggtatcctttggtatttatatgaggatactaaggataatatgtggagggaagcagcagggaaagtaaccgatatgattgctcccttggcttacaggaaagcaaagagtcatgattccggttttattatgatgtgtagtttgggcaacggttatcgtttgacaggaaaaccggaatataaggaaggattgctgcatgccgcagattctttggctatgctttataatcctgttgtgggtactattttatcttggcctggaatggtgaaaaaagaaaactggccgcacaatactattattgacaatatgatgaatttggaacttttgttttgggctgcgcggaatggaggggggcagtatttatatgatattgcctgtaaacatgcggaaacgactatgaaacatcaattccgcaaagattattcatgttatcatgtagcggtgtatgatacgctggatggtcattttataaaaggagttacccatcaaggattgagtgatgattctatgtgggcccgtggacaggcatgggctatttatggatataccatggtatatcgtgaaacacatgatgtacgttttttggattttgcccggaaggtatcggatgtctatttgtcccgtattcccgaagacatgattccttattgggattttaatgctccggaattatcctcaggtgaaccgaaagatgcatcggctgctgccataacggcctctgccttattggaactttccacctatataaataatagtgattctgcatctttctatcggaataaggctgtggaaatgcttcagatactatcttctccggcatatcaggctcgcaataaaaaagatgcttttttattgcattcggttgggcacatgaacaagggatgggaagttgatgcttctattagttatgcagattactattatttggaagcattggtacgattgaaacgtttgaaagagaaacaatctgttttggctaatttataaaatcattgttaatccgttcatattatgaatacacaatctattgatattagtctttatcaaaaaggggatatagccttggaagatatttataagaaatttaagaattgttttatgcggtatgcgggcaaggtgttatctagtgaattttatgctgaagatgtagtgcaggatgtatttatagggttatttcagcagacaaattattttgtatctgaggctgcagccttaaaatatatttatgcagcaatatataatcgttgtattgatttggtacgccataggcagatagcgcaaagatacgaggaaatctatagtaacgaaaaaaatagagtggtacatataaatggatataacgatttgttggcaaaagagttttttgtgattgtggagaaaaggattaattcccttcctcctaaatgtaaacagatatttatcatgaaattccaaaaagagttttctaatccggagataagcagaaacttaggcctatcattgagaacaatagagaatcagctatatatagctaggggagttcttcgtaaacagacggatagatatttatgttcttgaatatgtgagtgatagaaaatattttttctgtcttttgagtgtattttattttagattcgtttaataagtaaaaaaagaaaatgaaaaatagaatgatttaataaattaaactttaagtacatgctatgaaacagaaagacaaatttttattacttatggtattgtcttgtttgccgttaggaaatgcggttgcagagcaaacaggtgcagggttgtactctccgattaatcaagaagtattgcagaatacggtgaagattacgggacaagttattgatccaaatggagaaccgataataggtgctacagtaatggagaaaggaactaccaacggtattgtaactgatttggatggtaattttagtttgactgtttttccttctcataagttacagatatcttacgttggttttcaaactcaagaattgaatattggttctaaccgttctttcaagattgttctaaaagaagatactgagctgttggacgaagttgtagtggtaggttatggttcggtaaagaaatcggatttgacaggtgctgtagcttctgtttctactcaggatttgataagaagtggtagaacggatgcagtaggagctatgcaaggggctttgccaggtgtgcaaattcaacgttctaatagtaaaccaggaggggaatataatattctgattcgtggtttgaatacaattagcggaagtacatctcccttaattgttgtagatggtgtgccaggagcttctttatctaacctgaatccggatgatatagaaaaaattgatattttgaaagatgcatcatctaccgcaatctatggttcccgtgctactaatggtgtagtcatggttactactaaaagaggtaagataggtaaagtaaaaatagattatagtggatatgccggatataggaaatatacgaatatgcccgatatgatgtctggtgaagaatatgtgcaattggcacgagaggctaaaagagccggaaataataataaatatgtggatgatagtcagattttcacagcatcagagttaaaggctattcaagatggaaattattttgattgggtggatgctgtttctagtccggcctttatgacaaatcatactatatcggctaccggaggtaatgagatggctacttatgctttatctgccggatattattttgaagatggtatgttggagcctcaagaatattcccgttataatctgcgtgctgttgtggatgtagaacctagcaaatacatgaaatttggaattaatatgtatggaacccattcagtacgtgatacgggtaactctgacttgttacaggatgcttttcgtctgcgtccgacttatcatccgactgatttggtgacaggagaagaaatgtgggcttattctaatggtcagtataatgcgttaactaccatgaagaatgaactgaataaaaccaaaaagtacaatttgctgagtaacatttatctggcaataactccaattaaaggattgactttgaagaccactttctcgccggatataaatttggaagaaattggccagtacagaggtaaatacactaaagctaataaagggcaaaataaggcaaccagtaattatgcgaaaaatagctatgtagattgggtttgggataatcttgtaaattataactttgaattgaaggatcatcgcgtagatttgaccggagtgttctctatgcagcaatcacaagatgaaaagttaaaaggaattggtaatggattgtcatataactctttgtggtataatttggcaggaggatcggcaagtaatacttcttcttccggttttaccaaaacgaatttgatgtcttatttagcacgtgccaattatgtgtataaggacaagtattttgtaacagcaagtattcgttttgatggttcgtcaaaattagctgaaggcaataagtggggaagttttccatcagcagctgtagcatggagagtgtcaggagaagaatttatgaagagcttgtcttggttgagtaatttgaagttacgtttaagttatggtcagaccggtaatgataatgtaagtgcgtatcagacgcaaggatctattagtggtgccaaatattatacattcggttctagtgagtctattggatatgttcccaataatttacggaatttggatttgggatgggaacgtactacagaatataatgtaggtcttgacttcggatttttcaataatcggatttcgggtagtgtggaatattataatcgtttgacagaagacttgattatgaataagacagtacctgttactaccggttattcttctgtaaaagcaaatgtagggtctgttagaaatgaagggtttgaggtaaatattaattcggataatatccgtactaaagatttttcatggagaactagtttgaattttgcctataataagaataaaattgtagatttacagtataaggagaatttgacttcccgtggattgtctttagctggtatgagtggtgattatagtaatctttggattattggtcagcctattgatataaattataatttgatgacattgggagtatggcagctggatgaagctgaagaagcagctaaatatggttgtaaacctggtcaatataaacctttggatttgaatgaggatggtgtgattgacgataaagatcgtgtgattgatggtaaacgtactccggattggacaggtggtatgactaatacatttacatataaggaatttgatttgtcatttcaagcagctttccaagcaggggcaagagctagaaatcagttctatgtttcgtatgcattggaaaacaacaatctcaattttaataatttaagaaaagattattggactccggaaaatcctaccaatgcttctgcacagcctagtaacatgggtacttatcgaagcaaggcaggatcatggggaaatgcaaaatcggaaatgtcacatacgatgttttccagtaatttccttaagatttcttatattactttgggatatacttttaaaccatcggttcttgagaaaatgaaattaggcaatttgcgtttatatgcaacagttcagaatccatttattttctgtgcaaaggatgtggttgatcctgaacagttgaatgtcagcatcaatacatcggatgcaatgactcgcaatgtaatatttggtattaatttatcattcaaataattaggatagtatgaaagcaaaaaatatatttactaaaggtttcctgttggcatctgtgtttgctctttcgggatgttcgtcttttctggatgaaaaaaattggtctagccagtctgctgaagaatattatgctacggctgaaggatatgagtctcttattaatggagcctattccacattaaaatctgtttataatacaaccaactattttctgttgacccaacttggtacggatttggggactcagaatgacggaacagcaaccaatgctttaaatcagtatacagtagattataccaatgataatggcactgtctataatcagtggaaggtattatatgagtctttgaaaaatgtaaatgctgctattggtcgtgctgctatggtagttacaaaggatcaagatatttttgatggtattgataaagaaatcttggcccaacgggttgcggaagctaagttcttgcgggcgttatatctttttgaaattgtaaaaaattgggggcaagctccattgatcttggaagaaccgacctcaccttctacaacttcgcaattggatagtggatctgatttttacagacaaattctggcagatttgcaggacgttatggattcttctcttcccatgaagcagacttcggcgaattatggacgtgtatcaaaagcggctgctaaacatcttcgttctcttgtttatttgactcgaggatatcagagttatgcagaagctgatgattttaaaaaggcttacgatgatgctgtagatgtaattaagaattccggacatacattattggatgattatgcaatggttcatcgtcaggcaaatgaagagaatgatgaaattattttcagtcttaacttttctgccggagcaggatggaataataatattcagacagaattctatttgtttgtttatcgtgaaggttggactgatttgggcttttcttcaatttattgtaatgattatgcttctgttatgccaaccaaatatagttatttattatttgattggaagaaagatagacgtacggaagttacttttatgagtccattgaatggtgacccggctacttctatagacggacgtgcttatggtagaaattggtttgagagtacaaatggggtaaatgtggcaaagggtgataccgtaatttatttccctgttcccggagagagtggttataaacaatatacagatgctgaaaaagcggctgctaataatcgtggacgttttttctataattatcctgagggttcttatgctgatgctggaaatgatgattattataaaaccggttatcaaagctttaatgcaaaatcacgtgtttggcttcctgtttggaaatttaaagattgtaatacccgttataacagttcgggaacagtagaaaatggaactcgtgatatttatttgttccgattggccgaaacttacttaattgctgctgaggctgctgttaaaatgggagataactctaatgctttatactatataaatcagatacgtaaacgtgccatgaataatgctccggaaggtggactgcaagaatatgttggtactgttacattagacaatgtattggatgaaagagcattggaactttatggagaagcaccacggtggaatgacctgcagcgtacaggaaaattggcagaaagagttttgaaatacaattgggatgtcactaatattacaggtggattgattcagacccaattaagtgaagctacctttaaaagtaaatatggtcttcgtcctattcctgttacatggttgaatactttatccaacggtcaggaattaggaaataatccgggttgggagtaattgaattatcttaatattataataagtttatagcgtattcttccttttttgttgatctatagtaaagacggttttttaatctgtcaatgacataaaaaatagagagtacgctataaatgtataactttgcaaggtataaatagttagtatgatgaaaagattatatataggtgtattatggatggtattttctttatccatccttcaggcaaaagagataaagatgtcctcgccggatgaaaagtatcagtttactttaagtgatgagggtgggaacttgcattattctttgaattggaatgctaaagaaacgataaaaccatctttattgggtattaaggctaatactatatggcgtgatcatttgtcattaggtgacatgacaactgccgaacaggatactgtctggcatcctgtatatggagaacgtagcaccataaaagatcagtataaagcttggtcggtagtcattaaccgtcagaattctcgtgacaagttggttttggatatacgggcgtataatgaagggattgcattccgttatcggtttcccggcggacaatatttgaagatcacagatgaatttactgaatatactttaccggaaggaacaaaagcttactttacatccagggctcagactccttatgaatttctcccattggaaggatggcccggtgaatcagaccgtccgttgcttttgacattacctgaaggtccttacgtatgtctggctgaagcgcaagtggtagactatgtgcgtacaaaattcaagttatcgacagaaaaaaagaatacgattcaatctgctatgtatggtcccgtagaagatattgctccttatcatactccttggagggtgattatgtgtgctgataaaccgggacaaatattggaacataatgatttgattctgaatttgaacccttcttgtaaaataaaggatacttcatggataaaacccggaaaagtggtgcgtgaagtgacattgactacagaaggaggaaaagctttggtcgattttgccgtgaaacgcaatctgcaatatattcattttgatgcgggatggtatggatttgaatatgacaaggtttctgatgctactacagtgacattagaccctcgtagaaatccggatataaatgctttgaacctgaaagaggtggtagcttacgctaaagaacggggtataggagttatcctgtatgttaatcaacgtgcattacaacagcaattggatgagattcttccgttgtataagtcttgggggatagcgggtattaaatttggtttcgtacaggtgggatcacaagtatggactaaatggatgcatgaagcgatcaagaaatgtgctgattatggcttgatggttgatgtacatgatgagtaccgtcctacagggttcagtcgtacatatcctaatctgatgactcaggaaggtatccgaggtaatgaggaatttcctgatgcaacacataatgctactcttccctttacccggtttatagctggagcggcggattataccatttgttactatcgtcaggatttcggtcgcttgaatgcagacaaggatagttatggtgttcctcgttctaaatctatccagaccactcctgcgcatcaattggctttggcggcagtttattatagtccgttgcaatatatgtattggtatgataaaccatcagattctcaagacgaacccgagttgaaattctttgatgatgtatatactacatgggatgatacaaaagtgttgcaaggggaggtcggtgaatttattactatagcccgtcgtaaaggagaggaatggtttatcggttcgataacaaataatgagaagcgtgttttatctgtaagcttggatttcttgcccgaaggaaagaactacatagcggaaatttatacggatggggataaatcagtgaaaacacgtactaaagtcagagtttctacttatcgtgtgagcaacaagacgaaattaaacttttgtttgaaagcatccggggggggggcagttcgtttagttcctgacgatggaaatataaaatctgtcaaaaactataagcagcagcggttatgagaaagtttaaaatatcagtcctgttgaaattgggtttctattgtctgtttttgagtataggacttgagatgcaggcccgaaaatttgtgcatccgggaatattacatacaacaaaaagtattgagcggatgcgtgctcaaatcgctgataaggaatatcctgcctatggttcttttgaattattgaaaagtcatcattgttctcaggcggattatcagcctttcggaccttttgaaatcatttcaagagatggtgagtttcgtcatacaaaatcaaaaatggagcaagactttagtgcagtctatcagaatgcattgatgtgggttttgactggtgaaaagactcatgccgagaaatctttggaattattgttaggctatgccggaacacttaaaagaattccggaaacgaatgatgcccctttgttggtggggttggaaggattaaagattatttatgctactgaaatactgcgtcatacttataaaaagatgacagttgttcagtttaatgagatcagtagaatgataagggaagtgttcttgcctgtaatggaaaatttttaccatcgtaagccttatacaaatgggaattggggacctattgtgactaaagcttatatggcagctgctattttatgggataatgaggaaatgtataataaggcggttgatttttatcttcatgccaatgataacggaacaatagctcattatatcagtggggataccggtcagatacaggagagtggtcgtgatcaggggcatagcatgttgggtataggtgccctggcaactgtttgtgaaatagcttggcaacaaggtgatgatttatattcggctcttgataaccggcttatgaaagggtttgagtatgtcgcaaaatataatttggggtataatgttccttttgctgtgtggaaggatgtcacaggaaaatatagcaactggactgagatatctaataaaggaaggggtagatatatgccgatttttgaaatgacctacaatcattttgttatacggaaagggatgcagatgccttatacggaacaggttcttcggcagattcgtcctgaaggatacgatcgtgatcagcctgcttttggttctttgttgttcaatgaagcggggactaaaaagaattatgttgacttggtaaatccttttgttgacagtcaccgttcccgatggttttttttcagttcggcatgtcgtccgtttggtatggtcagccttagccctgatacggataccgagcactcttggggatcaggatatctgtatgactcaaaacaaatacgctgttttagtcatgttcataattggcagatgtccggtgtggcggtgatgcctaccgttggcgagtttaaagggcatttgggtatgaatgcttatcaatcggcttttactcatgatggagagatagctaaaccgggatatcataaagtgaaactgacagattatgacataacagcagagttgacttctactatgcgcgtaggctttcattgttatacttttccgaaaagtgatgccagttatattttatttgatacgggagcgtttttggcacatggacctacagcttattcggaggtttggaaagtaagtgataaggaaatagccggatgggagatgatggaacgtacaggacgtcgtcctaaagatactcctgtttatttttatgcacaattgagcaagccaatggataaggttgtatcttggcgcgaaggccggatagaatctaatagcaatccggaaagaatatcaggtaagaatgcgggtatggcagtccgatttaaaacagaaaaagacgaaaaggtgatgctgaaagtggcgatttcatatgtcagtgtagaacaggcacgtaagaatatgttaacggaactgtcaggctgggattttgagcaagtaaagcagtcttctttttccgaatggaatgattggcttggaaggatagaagtggaaggcggtagcagagaacagcaaataaaactctatacggatttgtggcatgccttattgggacgccatgtagtcagtgatgccgatggacattatatggatatgacttccgactttccgcgcatacggcaaattcctttgggagaagatggaaaacctttgtataatcatcataactttgatgcatggtggggaagtcattggtcactgaacatactctggtctatggcatatcctgaagttatggataatttctgtaatacaatgatagatatgtatcaaaacggaggtctgattccccgtggaccatcaggaggaaattatacgtatgtgatgattggtgatccggctgtttctttttttgcttcggcttataataaaggaattcgtaattatgatgcggaactggcttatgaaggtttgcggaaaaatgcttttgtgggaggtattcgcgaccatgccggttatgaacatagcaagacagcttattccggtggcatgaaatattatgaggaatgggggtatgtgcctgacggacggaaagatgttgaagggatgcatactaccggagcttccatgacattggaatatgcctatcaggattggtgcttggcacagatggcgaaaacaatggggaaattacaggattatgagttttttatgaagcggtcaaagaattatcgtaatctttggaatccggaaagtggttatatgcaacctcgtggagaggatggcaactggttaccttattttgatccgttggaattgacagaaaaaggaggattttgcgagagtaactctgctatttattcacactatgttccacatgatatggcaggattgatagaactttatggaggtgccgaccagtatgttaagagattgaatgctaatttcgaaaagagtgagtcgtatgggtttttccgttctaataaaacaaaggaaggcaattggacagattatggtaatcagccggggactggaatggctcatttgtttagttatgcaggagcaccttggcttactcagaagtgggtgcgtaaagtaaaagctgcttattgtgatgtgactccctatggaggctatcgggatgatgaggatcagggacagatgggggctttaggtgttctgatggcaatcggactgtttgaggtggatggtggttgtgcggaaaagcctttttatgagattacttctccgctttttgataaggttactattcatttggacaatcgttattattccggaaagactttccaaatcataacgaaaggaaattcaactgataatatgtacattcaaaatgcttcccttaatgggaaaaagtggaataaatgttggttttatcatgaagactttattaagggggggactttggagttgaaattaggggcaaagcctaacaaaaaatggggtgtagaagaacttcctccttcatttatatcttcaaaatagagattaaaagattcttgttcaaaacatcggtaaaggatctgtgaacataaattagatgtgaactgattatttaccgatgttttaatgaaatactgtatttataggaatctgaatattcctgtcattccatgctgagttaaaatggtgggaggtttagggcgttatttcgaactgaccatgtaatctgatgtctgtagaagaagctccgagcattactttgaaactacccagttccacacggaaattcatatttttgtcccataatcctaaatcttgtggtcgcaatctgaaatgaacagtttgttcttctccagctttcagactgatacgttcaaagccgcgtaatactttggtataagtggtaacgctgctgatttcatcccgtaaataaagttgtactacttcatctccttttatttttcctgtatttttgattttacaacttacatggatatctccttgtactccttggtgtgatggtgatatatgtaaatcactgtaagtaaaagtagtataacttaagccatgcccgaaaggatataacgctccgtaaacggaagtagaggaactttcgtctgaccctggtttaaagggaaaagcaaaaggaatttgccctacagatttaggaaaagtaactgccagtcttccccccggattataatcgccgaacaaggcttcggccacagcttgtccgcaaaattctccgggaaaccaagcatgtaaaatggcaggtatatgagctgctgcgtaatttatagaagaagcgcgtccgtcgagcattactagaatgatcggtttcccggttgcacaaacagcttttaaaagttcttcctgccgtccgggaaggttaaggctggttcgtgaacgatcttccctgacggtcagttcattccctcctaataccatgactaccacttcggcttgtttagctgcacgaatggcttcttccattaattggacttcttccgcagttttcggaaaatcaaggatttcactttctgggaaatgaggatctatgatgtcacatccttttttatagatcacttctgtatgaggcaacagttcttttataccttggtaaacggttttaataggagcattggccggaccgtatctgcaaatcaattgagtctgttcgttggcgttgggaccgataacagcaatggaacggatagatttggataaaggaagcaggttagtttcattttttagtaataccagcgactgacgggcagcttccaatgatacagcttggtgttccttactatggactatttgttctgcttgtttaccattgccacgatagggattgtcaaataagcctagccggaatttgatacgaagtatctcggctacccgtttgtcgagagtctcctgagagattttgccattatcaacagctttacgaagaggcaagataaaatcggcaggcggagtgaaatgggtacggatattcagtccggcattgaccgcctgtgctattccgtcttcgtatgtatctgctactttatgcttgttggagataaattccacagcttcactatccgatactacgtatcctttaaatccccattcttgacgtaatatttcggtcagaaaatggtagcttcccgtaatgggttccccgtcatagtcattataagagctcattactcccagcgctccggcttcttgaaatgccatccggaaaggttctatatataaggtacgcatttctcgtggggctacgtgtgggtcggttcgtgtctttccgtcacgtccgcctatcgggatactataaactgcaaaatgtttcggagtagctaccagattatatttttgcaaactggtaatcatttgttttcctaattctcctactaaataaggatcttctccgtatgtttctacacatcttccccagcgagggtcttgggcgatatcaagaatgggagaatagatgttggtatatcctaatgccactgcttctttagcttccacttctccgatacgggctattaattttttgttccaggtggcaccctgtccgcactgggcggggaagtaggttgcccggtcatgacataatccgcgaataccttcattggtgaaatctactgggatacctaaacgtgttttttctacaaaccagcgttgaatggtgtgtttggcattcacatgtttggcgtatggaaaagaatattcggacttgaaagcccctaatccgttatgttcttcatctatgtttcctattccgtctttccatacttctgttttccaattgttttgaggcaacgcatcttttagtacgcgttctgaaccgtaaagtgtggccatttgacaggttttttcttctagtgtcatttgtgaaagcaggtcttgtactctgtcttccagcggggctttaggattttcatatagatccattttcccgttcttgttgaagtctatccatcctttgtggtaaattccgtccggtatgccccctgatattggggtacagaataggaaagtgattgctacagataaagtgtgtttattcatgctatttaagttttgtatatgtatctaatacgtacaaagataggtttttactcatttctttggaagataattttagaataaagttgagtgtttcttgattctgattcgtttttataataaacaatgaagatagctatgaaacatgtatttttatttggaatattcggttggcttttatcatttacgcttgttgcacaaacaggaatttggcaatggtctgtacccgtccataattttagtactcatcccaaaaatcctgagtcaagggcttacttgtggattcccgggcagtgtgaacaagtaaaagcaatcttggttgcccaacacaatatggaggaaatttctatccttgaagatgaggctttccgacaacgtatggctgagcttgatgttgctcaaatatgggtatgtccttctttcaatcatggatttgattttacggatggggcatgggaaactttggatggccttttggcagatcttgctgaagaatctggatataaagagttgtctacagctcctttaatagccataggacattcggctgctgctagttggccttattatcttgctgcctataaaccggaacgtacattggcatgcatttctgtcagtggtcagtggccatatcatcgtgatcgctggctatgtccggatatttggggagaacgtaacatcaataaaattccttgtctggaaaccatgggagaatatgaatcagcacatacatggagcaatgaaggtttgaaagaacgtaaggagcatccattgctgcctttaagcatgttggcctgtcctgctgaaggacactttgcctatactccggaaaaagcacaatatatagctctctatatcaagaaggcaatgcattatggacacgtagatccgacaaaggagggatggttgatggagcgatggaaaaaaaataaaaagccttcatgtattccggcaccggtaaatcaatttaaaggggatcctgcacaagcattttggttttttgatcgtgagatgatagaggctactttggcgtatcaatcccgatattacgatatgaagccacaattggtaagtgtgtctcaaaacggaaaaacagtatcccaacagaatactcatttacaagttcacccggcttttataccacaggaagatggtatcacatttcaattgacccctgtttttttggatactgttccaggagaaagtccccgactttccaattggactgatttgcctgttggggcatctattggtcatgctggaaaagctccggtcctgcagatgattaccggcccagttgttttagttgattctgtgacatttcgaatacaatggaatcggggaactttatggacggacaagaaatcggatattgttttttcaataactcatccgggagatgaagaatataaaccggctgttcagcaagctcagatgataattccggttaaaaatacggaaggacagcagcaatatattaagtttgcaacgttaccggacataaagcgtggtactaagtacgtttctttatctgctgtttccagttgtggcttgccggtagatttttatgtggaatcgggaccggcttatgtggatggtaatcgattgatattaactgctattcctcctaaaaccacctatccggtaaaagtaactgtaatagcatggcaatacggaaaaaactctgatcctaagataaagactgcagagccggtaaagcaaacattttatattcggtaactttaaatttgaatggaagaggcggatgataaaataattcatttggattgagtggaatagctttatgatacgtatttttgtgaaagagaatgaatagaattatgagaaagatcgttttatggatatgcttgcttgtaacaagtgtattatatgcacaggaaacttccttatcggtgaaactgtcacaaggtcatccccgttatctgacggatagtaatggcaaagttgaaacgcagaagttgataaaggaagaaccgtgggcacaggaagtgtttgaaaagttaaagcaacggactgaccggtatgctgaccgagggcctgaatggcttacttcccgtttgcaaatgtattggaaaactcatgcaacggaggtatatattaaaggagaatattatgatcatgcaggaggagagaaggcgccggctcctacggtgatgtataccggtgcacgcagtcatgcaactaactatgtacgtcccaagctggaagatttgaagccttatcaggaagatgctcggggaatgtatctggcaaatgggacgttggaaggcagaccgtacgaatgggtgaatatcagtaaaaccggaaatatcatccaaagtattaatgtagagatactgggtatcgcccgtgatgccgcttttctttggtggatgaccggggagaagaaatatgctgatttggcagcttcggtatttgacacttatatgacggggatttattaccggaatgttcccaaggatttgaatcatggacatcagcagactttggtgggtatgagcagttttgaagtcattcacgaggatgctgtgaatgctttggttccattgtatgattttttatatgattatttgaaaaccgataaggctgataagatggacatctatgccggagcattcaagaaatgggcggataatatcattgataatggagtgccgcataataactggaatctgatgcaggcacgttatatcatgagcatcggcatgattttggaatctgatgcttcttatccggataaaaagggaggcgagtattatattgattatgtgttgaatcgttcttccatccgtcaatggtcactgaaacagcttgctgattatggttatgatgctgaaaccggtatttgggctgaatgtccgggttatagtcaggtagttgtcggggattatacggatatggtcactatctttgaccgtaatttgggtatggacctgaccgaggagattcctgtcataaaaaaagcggtggccgccgacccgcaatatttgtttccggattgtatgacaatgggttttggcgatacacatcccggtaaattgaatcctgctatctttgcccgtatggtagctaatgcccagaaacatggtaaaaaatatcaagaaagacaatttactgctatgttgaagttatttgatcccgatgcctccaaaccggcgactgaaaagaaaaatgtgagggtggcggtaacttcttttttcagtgacaagcctttggtaattgatgataagatacctgccggtgatatcaatgattatgtaactcctactttttatgctcccaatgccagttggttggtgcaacgcaatggcatggacaaacgtcatagtttgatgattgcccaaaatgccagtgaagggaatcacatgcatgccaatggcatcagcatggaactttatggaaaaggatatcgtctggcaccggatggaggtattggcttgaccctttattccggtttggattatttggagtattatagtcagttccctgcacacaatacggtttgtgtagatggaatctcttcttatccggttatgaaaagcaatcatgctttcaaattattgaactgctaccccgaagcagggatgaaagtagattatcagcctgtgagttatagtgaagtctttttccgtgaacctgaatcacaagctgatcaaaaccgtatgatgagtattgtgactacaggagaaaagaacggatattatgtcgatattttccgtagcaggaaagtggagggaggagataaaatgcatgattatttttatcataatatgggacaaaccatgaacttgactgctgctgatgggagtagcttgtttcttcaaccaacggaggaactggcttttgctggggcacatatatatgcctattcttatttgtttgacaagaaaagtgccgagacctccaaagatattaaaacaatgtttactatacagatgccggatgaggataatatcagtatgaatatgtggatgaaaggtgctcctgaacgtaaagtcttctcggctttgagcccgatgactgaaggattgagccggattccggatatgccttatgctatcaaagagcaacctacgttgacttttgtagcccgccaacaaggtgaagcttggaatcgtccgtttgtagctgtttatgaaccttcttcggtaaaggagccgggatgtatttcctccgttacttttccagaagtggaaagtggtgtggctggaagtcatgtcggaatttgtattcaacaaaaagaggggcgtgtggaccggattatttcttcggatgatgcaggtcatttgtgtaaaagtggagaaatgactgtacaagctgcttatgcattgtggggaaataaacaaggcgatgattgtattttctttttgggaggaggtacactattgaaaactccacatgttgaaataagttcattgacagtaacagatgtgatgttggtgtataaagagggcgtttggaaatatgcagcttctgcaccttgtaaagtcaggatgaatggaaaagaatataatttgttgcccggacatgatttacgcaaactttgatataaactttcttttataaagtaatctttttaaatcatcatcctttctttttcatacagcaaataagaagtggatgatgattttttctttttttgatagggaaaatatattcccttttcactatatttgcattatttgataaacacgaggttccaaatatgcacaatgtaatgaaaaacattttaagatttatatttatattgtttcttatattcttgtctttacccattttctctcgttcctacgcttttcgtggcttgtctgtaactgagggattatcagatttagtggtaaatgccatctataaagattctttaggttatgtgtggttggggaccggcaattcgttggaatgttttgatggaattcatttcaagcattatcttattccgggttcagatgaaaaattgaaacgggtaaatgccattgctgagatgcctggcaatgaattgtggatggggaatggtagtggattatggcgtgttagcaagcagaaaaatagtttggagcccattgcccgtgaaacgataggatatgctgtgcgctctcttttacatgatgggaaaggaatactttatatcggaacagaaagggggcttttcatttataaaggaggtagcttgaaccaaattatgatagatcctaatatgttgtcggcggcgaactctattggtggcttgaatttgggagaagatggaatactttggatggctacggagaatggtctttattctctgcgactttcagatagaaaaatagaggcttatcataatgtgatggaagagaagcatgtttgttcttttaagaatatagctaggattgggagtatgctttatttaggaacgatggggcagggaatcatcagtttcgatacacaaactaaagaatttgctcgttttgttgatgtaggttgtaatgtaatttcttctttatccggtgatgggaaaagccttttgtatgtgggaaccgatggtaacggagttcattttgtatcaacggataaaaagaaagttgttcgttccatgcgtcatgaaacagggaaggatgaaactttgcgttctaattccgtttattctgttttggttgataaagaaggtttgatttgggtaggattctatcagctggggttggattacacattatatcagagtgggctgttctccacttatacgtatgctcctttttttgattccagagatatgccagtacgtgcacttgctatcaaagagaaagagaaactgattggatctcgtgacggacttttttatattgacgaagaaaatcatcgttataaaagtttcaaggttccacagttacgctcaaatatgattttcagttgtctgtattatcagaatgagtattatataggtacatacggtggtggaatgtatgttttaaatcctgcgactttgacactcagagattttgaaccggatggaggaatgccttttagtaagggacatattttttgtatcaagcaggatcgtgaaaagaatttgtggataggaacatctttaggaatattctgctataaagacggcagacagatagctcattataccagtgccaattctaagttgccagaagggaacgtatatgaaatctattttgattccactcataaaggatggatatgtacagagaatggaatgtgcatttgggacccctctgcccggacattgaaaaccgatgtgtttcctgagggatttattcataaggaaaaaataagagtgatctacgaagattccaaccatgatctttatttttttccggacaaaggctctctttttatctctgatttgtctatgactatttttaggcgtttgcagccggggactcctttggatgggaatgatggtatgtttattgtagaggatcgtgaaaagtggttatggctgggaactaacaatggtttgttccggtatgataagaaagaccattttattccttataattttgttgatggtattcccagttccatttttactctttgtccgccggtacgtgatgagaacggcatttggtttggaaactccaaagggcttctgtatttggatacagtgcggatgaatcagaggaaatccgttccctattcggttgccataacagatatatgtgtaaatggaaaatctgtagtgcaatctgttgtgggagatggcggcaagagtgaaatttcattggaagcttctcagaagaatgttaccttttacttttctgatttcagttatacggcacctgcttttatgtcatacgaatatcaattagagggtgaggataccggatggatggctttgacaggtcgttcggatattacttattatgatttaccgtccggtaattatacttttaaagtaagacagatggggaatccagagtcagaaactcagctaacggttaaaatagcgtcttctattagtatatggagcatagtgttcatcgtgatagctgtggtgaccggaagcattgctgtcctttatcaaaaaaagaaagaggtggagaacgaaagggaagaactgatgcctgactctgctaaagttatagaaaaggagattcagccagttgaggaatcccatattgtagcggaagagaaatacaggacaaataagataagtgtggaggaatgtaaacggttggctgagaaattggagattgttatgcatagagaaaaaccttatactaatcctaatttgaagattgccgatttggctgtgtccattggcacatcatctcatactttgtcctatttatttaatcagtatctaaaccgtaattattatgattatatcaatgattatcgcatagctgaattcaagcgcttggtggagaaagatgaatatgctaaatacactttgagtgctttggctgagttgtgtgggttcagttcaagagcttctttctttcgatattttaaaaaagcgactaatatcactcccaatgagtacatccgaagtattgggaaaaacaatgaataacctctctattttttgttgagagtctcaaattattatatgatactgagtgtgtcaaattcttaatctgttataaactagcggattagtctgtctttggtctagggtaatgatatgagatttattagaatagaaaaagtgtttttcttgtccttctaccttctatatttgcattcgtaaatgtaacccaaaaagctgaagacatgaaaaacatatccatgaaatctactcaattaatagaggattcttatacgaattatcatcattcggtctatctgtatatctattataggatagctcataaagaagaggcggaagacttggctcaagatgtgtatgtacggctgatggactacgatcggatgctctgtgcagagactattaagtattttatttttactattgctcgtaatttggtaactgactatttacgtcgttattataagaggcaagaagttacttcttatttatatgagcatacggttgcttatacaaatgaaacagaacttcgtgtggtggccaatgatttggaagcgtgtgagaaatatagattgtctttgcttcctccacggcgtcgtactatttatgcaatgagtcgttttgaagacaaatctatttcagatatttcagcggaattaaatctttcgcaccgtaccgttgaaaaccatttaaggatagggcggcatgaggtgcgcgagtttatcaaacagtgtatataataagaaaacaacaataaaactgttaatattaaattttaagtttatgaaaaacgaattctttaaattttcatcgagaagaatcttgttttctacggtgatggcttctgccttgttggcaggtagtccgcagactgtatttgcagaggtgaatggggtgcagactgttatgcagactggaacggtaaaagggcaagtggtggatgctacaggagaaccggtaattggtgctacggtacaagtaaaaggcacgactaatggtacaattaccgattttgatggtaattttacattgaataatgttccggaaaaaggcatattggtcatttcttatatcggatacaagactcaggaagttaatatatcagggaaaacaaacgttaaggtcgttttgaaagaggatactgaggtgctggatgaagtagtagtagttggttatggtgcccaaaagaaagcttctttaactagttctattagtcagatcaagggggatgaggcttttaaaaataagggtattgctaatgctacagtagctttgcaaggtgaagttccgggattgactattacacgcacttctactcgtccgggtagtgagggagcagagatgaaaatacgtggtgatatttctgttaatggaaaatcttctccattagttatcattgatggtataacaggttcattggatgagttaaatgctatggatgcaagtgatattgaaaatatttcagttttgaaggatgcttcggctgcgatatacggtgcccgttcggcttcaggtgttgtactggtaacaacaaagcgtggtaaaaaaggaaaggctcaaatatcatatagtggctctgttagtcgcacaattaacggtattcagcctcctattacaaataatcgggaatggttggatatgttttatgaagctcaatataatgatgctgccgctttaaatcctagtttaactactgctgatgaaattcataaagctgtaaattggtggatatttaattcttttggtggtcctactttggatcaatcggatattgatccggctactggtgcaccaacagtatataagggggaaactctttttaatgctcttcgtgcaggtaaagtcttgacattacaaaatggtgataaagtggaacgttgggacccaaatgtgtatatgatggattatctttatggtcaggcaacttctcaaaagcattcgattagtatttctggagcagatgaaaagtttagttatcgagcgtctttggggtatgcggataataattcacagttgaaagttgctaatgatggagaaaaaaaatatagtggtcgtttaaatgctgattatcaagcgacagatgctttgaaatttgaaacaagtatgtcgtatgacaaacgtgatattataaccccaactactgatgtgggagctggatattttgatccttggttttggactgtgtataataaaaatggtcaggcttatgatacatttagtggtaaccggaatcctattggtgggttgacccaaggaggggagaagaaaaattcattgacaacttttagaggaagtgctaaagcaacttatgatttttctaaatgggtaaaaggactttctatttcagcttcgggggcttataagactgtacagagaaatatgcaggaagtgaagaataaagtacaatattatgattgggtaggtacacagactggtaataagcaaggtcccggacaattgaaagaagaaatagcgaaatgggaaaacattactttaggtgcttttgctaattataatcgtacttttgctgatgtgcatagcgtttctgccatgttgggtatgactgccgaacaagaaacatataaaagggtaggtgcggttcgtaaatccggtgctgtttatccggggtctggattagcagatttggatgtatgggtgaatggaaataataatgaggcatatggtggacagaattcttggggattggtttcttatttagggcgtttgaattatacttatgctgataaatattcaatagaggtattgggtcgtcgggatgggtcttctaagttggcgaaagaacaacgttggaaaaatttttattctatttctggtttttggagactttcaaatgaagactttttaaaagatgtttcatggttgagtgatttgaagctgcgttacaattatggtagaacaggtagtgtggaaggtattgacaattacgagagatttgctactatcaaaactggtacgactatttttggtgtaaatcccggtacgcatacttcattgtgggtagacggtatgagatctgcggaacgtacatgggaaactattgacagccacgatgtgggagtggattttgcttttcttagcaatcgtttgagaggttcatttgattattttatcaagaccaataacggtatgtttattgatgtacaatatccttctattttaggtgcggctgctcctaaaaccaacaatggtaagtttcgtgcccgtggttgggagttggctttgaattggaatgatcaaataggtcaggtaaagtataacattggaggatctctttcggatgcatggtcaaaagtgcttgaattagctaataatgaaaatgtacctaatgagggtaagaatgaaaatcgcttaatcggtatgccaagacaagcattgtatgtataccaaactgatggtattttccaaagtgcagatgaagtggctgcatattatgagaagtattattggaatgcggatcattcaggaccgaaagctaataatattcttcctgcacctcaggaggcatctactaatacacttcgtccgggggctcgtaaagtagtcgatttgaatggtgacggtgctataacaaaagatgatctttactatgcaggagatatggcccctcgtttgacatttggctttaaattgggattggaatggaaaggaatcgatttctcggctttcttccaaggagtaggtaaacaagtattgttaagaggtggatatttggctgctccatggactacaaattatgttctgcaaaataaaaacttcgcagggaaaatgtggagtgagaataatcgggatgcagaatatactattgcttcacgtgaccagaattttaataagtggaattataataataaagatgtcagtgttcagaataatcggtatgtccgtttgaaatctttggtagtggggtattcattgcctcaaaagtggatttcaaaagccggactcagtaaattgagagtttacttctccggtgatgatctttgggaatggacaaaagtaaaggatggatatgatccggaatatggtgaaaattcaaataacacattcccgttcagcagattgctgacattcggagtagatgttacattctaataacctgttaaaatataaacatatgaaaaccataataaataaattttttcttgcatcggctgtggtgatgtcattgactgcatgcagtgactttcttgataaagaaccgttgtctcagggaacagaggctattgtgtttaagactcctgaacattttgaacaggcagccaatgctttatataatgtaattggatggaaaaatctggataataagccgtcatacggtgatataatggaccgagggacggatatcagtggattaggaagcaatggaggtggttcggcatcggaaggaaattggagttgggataagccttattcgcatatccgtacttgcaatatattgttggaaaaggcagaagcttatgatggtagccaaagtgatattgcccagtctgtggggactgcttatttttttcgcgcatggcagcatttttatttgttgcaacattttggtggtgtgcctatttcagaccatgtgttgactgttagtgatggagtgttacaggccccgcgaaacagtcggtatgaggtggcagcctttattatgtccgatttaagagaggctgtaaagcgtttgcctaaagaaacggaaattccggaaggaagcaaaggaaaagtaagcaaggaagctgccaaatcttttttggccagagtattgctttatgaggctacgtgggaaaagtatgttcctgctatcaattatgatttagatggtgatgggagttcgcagggggcaggaactgttaaaccggaaggatatccttctataaccgatatgttgacagaagcaaagcagatgtcaaaagaggtgatagaagaagctgaaagtggaacttataagttgtgggcagaatgtgattctttgagttattactatttgtttaatattgatgataagggtggaaatattcctaatttcaaaagtgctggaaaaagtacgaataaagaatttattttctcaaaaaaatatgactacgatctgagtcgtggtggtattaatttatcgcattcggtcatggtaggtgcagcaacgggtatgagtgctcagtttggtgaatctttcctttgtcgtaatggacttcctattcgtatcagttatacaggtagtatgtctgatgcgcagaataatccagaattcgagggatatgcaacatttataggtgaatatcgtaatcgtgattatcgttttgttggttgtactttcttacctgaccgtgtatcttatagtagccgtactgaagatggacgtcaacgtatggatgctagtcaaccttatcctactcctgtgtttcctaaggacaatgatcattatgatcctactgatcccgtatatagtagttcttgtgcagtcttccatcccacaattagaaataatagtacaatggggggatacagcagccgtaagtatttgattgaaggggcaaatcgtccggataatacagaatctgcagattttccattgattcgtttggcagaggtgcattgtatttatgccgaggcgacttgtgaattgaataatggaaacatttcagatgaagatcttaatttctctattaataaaaatcgtgctcgtgctggagtggctcctttgaccaatgcgttaattgctaatgtttgggatgctggttattgggatcatgctacaggaaaaactatttgtaaaaaaatgaatatgttggatgaaatacgtagagagcgtgcatgtgaactttttggtgaaggttttcgtatggacgatttaaaacgttggggtattgcgcatattaacttgactggtcgtaaattgggtcgacatgttttggggacggcatacgaaacagagaaagccaatgatgccacttacttcggtgaaccctgttattatccagaaaaatatcctttgctttatgggctttatgagggctctgatcctaacgaccctgactatggacgttctatagcaactttggctggtaatttgctttatacacaaagggattatttagatcctattcctcgtcagcagatacgtttgaatccgcaattaacgcagaatcctggttggtaataaaaactgaaggataaatcgaaaatcaatagactgatttatagtagttagggtgtgaaataagaatattctttaggtaaaggattatttcatgccctaattgataatgaaattgtggtatattagaattgctggtaggcgctttgagtgattgatagttattgaacgtatattctaaaataaatagcagactttacaaatgaaaagaatgagaacattatgcttgacaggtcttttatggatgatgacctgtattctttatgcacaaaaccagttgataacttatacggttcctagtgacggggtggagttgaaagacgattttacagttcgggtgaggcaatctggcagtggatggaaagaagtagttacttatccgatgaaagtagatgaagtacgccagacgaagcatcatgttgaactagcctcaatgggatattttgacttttccggtcaggtggaagtttccgttacctataataaaggagaagtaaagagtggcagggtgcgtccgttgtcgtatggtatcactccgcagattagcggcagtacgatgacttttacgctagaccgtccgcgtaatctgtccattgaggtaaatggagacatattccataatcttcatctttttgcgaatccgatagatgaaaatcgcccgaagaaattgaaagataagaatctgatttattttgctccgggaatacatcagttacccggcgatacacttaatgttccttcgggaaagacggtctatgtggcaggtggggccattgtgcgtggatgtatccgtgcggtcaatgcccgtgatgtgaaaattctgggacggggtgaggtgcatcccgaaggtcgtggggcaggcatcagcattattaattcacgaaatatatatgtggaaggtctcatcacaacccaatgccccactggaggttcggacagtgtgacaatccgcaatgtaaaggctgtcagttcatatgggtggggggacggtatgaatgtatttgccagcaacaacgtcttgtttgatggagtattttgccgtaactccgatgattgcactaccgtgtatgctacacgtatggggtttcatggcggatgccgtaatgtgacaatgcagaattctaccttgtgggcagatgtggcgcaccctatttttatcgggttacacggagatgtggataggaatgaagtgatggagaatctgacttaccggaacattgatattttggatcatcgggaaatgcaagtggattatcaaggctgtctggctatcaatgcaggtgataataatctggtccggaatgtacggttcgagaatatccgcatcgagaatttccggcaaggacaattggtgaatctgcgtatattttacaataagaagtattgcaaggctccgggcaggggcattgagaatgtgctttttaaagatattacctataatggcgatcatgccgaattctcacatatcgttggctacgacgaggaacggatggtgaagaatattcgttttgagaatctgaagataaacggtaaagttatatcggatgatatgaccggtaagcctgcatggtataaaacgtcggacatggcgcgtttctttgttggggaacatgtaggtgatattgtatttgtaaaatgaaaaaaggtagtttcaagcaagagcttcaagaagatttaaaactctgtggtcggtgttttttagagagagcatataaaagaaatcatctttgcgaaataaaaagaaaaggtaattatttaggtaggataatttttaaagaatgatcctttttgctatctttgtccattgaaaatgaataaattatattcttatggaattacaagataaatatatccgctttgattgggctgttaagcgtctgctgcgtcataaagctaattttggtgtgctcgaaggattccttacggtactgataggtgatgaaattcatatagtggagattttggaaagcgagggtaaccagcaaacggagaatgataagttcaatcgggttgatatcaaagctctcaatagtaaaaatgagattgttatcatcgagattcaaaatacgcgtgagctgtattatttggagcgtatcctgtatggagtggctaaagccattacagaacatatctcattgggcgagacttattataaagttaaaaagatatattctatcagcattctttatttcgatattggtcatggaactgattatctttatcatgggcagaatatatttaaaggagtgcatacaggagactttcttcaagtgagtactcgggaaaaggatgccattgtgccccgtatgccttccgaaatttatccggagtattttctgatccgtgtgaatgagtttaacaaggtggcggtgacccctttagaggaatggatagaatatttgaagacgggtattatccgtcctgacacgactgctcccggattgggtgaggcacgtgaaaaattgaaatattattcaatgacgcctcaggaacgccatgcctatgatgaacatcttagcgctttgatgatccagaatgatgttcttgattctgctaagttggagggaaagatagagggaaagatagagggacgattagaaggacgtgcggagggtcgtgaagaaggtcgtgaagagggcattaaagaaggtgttcttcgaaatgcccggagaatgaaagaaaaaggattctctacagaagatattatggaaattacaggattgacattcgaagaggttagtcagttgtaatcccatgtttggttaaataaatccacaggtggcttcttaaggtattttattttacgcaaaggtttacgtgctttttgttaagctgacttatatttaggtcagcttaatctttttatttttgagcacataaataaacgatttgttaacgtgtaatgaatgacacaatgaaaaaactcttctttttaatagcggcaagcttctttttaacttcagtagatgcgcagataaccgagcgtgaacgtcctgccgaatggcagcatttagtaaaaggcgcacgttttatggaccgtttccttcctatgccggacggcattcagattaaggggatttggggtacggacagtgtactgaatcgttatgtggataatggaatagaacttcccggagtttctttttggggaggaaatatattgcaggatacggatggtaaataccatttgtttgtgtgtggctggcctgaggattctccgaaagggcacatgttttggtcgaattctactgttttccatgcagtaagtgatcggttggaaggaccttttaaaattcaaaattctgtgggaaaaggacataatccggaagcgttccagttaaaggatggccgtgtcgtggtctatgtgattgacggttactatatagcagacggggtggacagcaaggtgtggacgtatggtaaattcagttttgattctcgtgaccgaaaaatcatagaggggctttccaatttgacttttgcccgccgtcaggatgattcttacttgatggtatgtcggggtggaggtgtctggatcagtaaagacggactttcaccttatatgcagttgactgacaaacgagtttatccggatgtggaaggcagattcgaagatcccgtggtatggcgggatgagttgcaatatcacttgatcgtgaatgactggttgggcagaattgctttctatcagcgttccaaggacggagtgcattgggtgacagaacaaggggaagcatacgtgccgggtgtatcattccataaggatggagcggtggaacattggtttaaatatgagcgccctaaagtttttcaggatgagaaggggcgtgctgtccaaatgaattttgccgtgattgataccattaaatggaacgatctgcctaacgataaacatagttccaaaaatataagtattcctctgaataaaggaatgctattgtctgttttgaatgaagaagagatcactccgtctactcgtactattgaggtaaagattgctgccgaatcaggttttaatccgcagacagatgtggatgtaaagtcgttgcgattcggttcatttaccgaagtgaattttggacgtggttgcaagcctgtgaagaccaaggtgtcgggcaaagatttgattgtggtctttaaagcgaagggcagtggcatcacttcggatgaatttgctcctaaaatgataggtaaagataaaaaagggaatatgttgtatggttatgcccgtttgccatacgtgaattatcggccggctctgctctccgcccgtcgccctctgtttgataaagaaaaaggtgggttgaaggtagagatacagaactttggtttgtctgcatcggaaccgacggaagttgaggtgatatgcaacggttccagccaaagaaggattgctttgaaaacattgcaaccttatgagattgagtgtctgatgtttgattcggatatgttactatcagatgataacgcatcgtatgaagtggtattctttcaggaaggaaaagaggtggaacggaataaattctagaagataagatcattgttgatgagaaaatggttaataggcttttatttttgagtggaaaatgcttatcaaacgtatttaaaaagaaaagcataaaaatgaaaaagttattagccttttgttttatggtgtgttgtgcggttgcacaggctcagttggtgacttatcccgaaggattgaaaacaggtatgcctcataatgatgattatacagtccgtgtccgtgttccggggggtgaatggaaagacctgtttgaatataatgtgcaggtggatatggatagggtacaagatgcttcgatggtacagtttgatatgggcagtcttgtggaggtaatggtaaaaaagaataatggaacgattcatgaggtagatattcgtccgcaggtaaatgatatacgctatgtacaatataagaatgtgattacatttatgcttgataaaccccgatatctttctgtggagtttaatggggataggttgcataaccttcatgtgtttgccaatccgatggaaacggagacttactcgaaagaagagaaaggagtgatgtattttgggccgggagtgcatcgacctaaagatttgccaaacaatcagataaggataccaagtaatacgacggtttatttggctccgggagcagttgtgaaagcaaaactatgggtggataaagccgaaaatgtacgtattgtgggtagaggtatcttggatcatcctattcgtggcattgaaataacagattctaaaaatgtagtggtggatggcataacggtgatcaatccggatcattacacggtattcggaggaggttctgtaggggtgacaatcagaaatttgaaatcttttagttgcaaaggttggagtgatggcattgacatgatgtgctgtcacgatgtattgatagacaatgtgtttatgcgtaatagtgatgactgcattgctttatataatcatcgttggaactggtggggcggttcggataatatcactgtacagaattccattctttgggcggatattgctcatcctatcaatgtaggtggtcatggtgatccggagtccttgataggtgagaccattgaaaatttgatttttcggaatattgatattttggaacatgatgaagatgatgtgccttatcagggatgtatggctatagatgccggtgatagaaacagggtgaagaatattttatttgaggatattcgggtggaaagtattcaagaaggaaaattgttccatatcaacattcgtttcaatcctaaatatgacaaacagcccggacagagcattgatggagtaactttccgtaatattacttataacggagtaggcgagaatccttcgttgataaaagggctggataaagaaaggatggtgcggaatattacgtttgaaaatgtggtggttaatggagagaagataaaggatttaaagggttttatcacgaatgaatatatcgaaggaataaagataaagtagataaaaaactgttttatagttggacctatttatgaaaagagagaaaagcattgagtgtttttctctcttttatcgtattatgtagcaagtttgaatgtcgattgaggaactaattagaaaaagacaatgaagaagaaaattttagttgtagccgggttattggctatgtcgggtgctttgacggcccagtctgtttatcccggccaacatgccggaaagttgaagagagaaaccgtggctccgatgaaagtcaagagttttgatttgaaagatgttcgtttgcttccaagccgttttcgtgaaaatatgatgcgtgattctatgtggatggcttctatagaggtgaacaggctgttgcatagttttcgtaccaatgctggcgtgtttgcaggtcgtgaaggtggttatatgacagtaaagaagttaggtggatgggagtccttggactgtgaattgcgtggacacaccacagggcacttgctttctgcctacggcttgatgtatgcggcaaccggcagtgaacagttcaaacaaaaaggggatagtctggtgaatggcctggcggaggtacaaaccgcattgggtaacggctatctgagtgcttatcctgaagaattgatcaatcggaatatccgtggtaccagtgtatgggcaccgtggtacacgcttcataagcttttctctggattgatagaccagtatctttacagtgacaatcagaaagctttggaggttgttatccgtatggccgactgggcatatcataaactcaaacctttggatgagactacacgtcaaaaaatgatacggaatgaatttggtggagtgaatgagtccttttataatttgtatgcgataaccggggacgaacgtcatcggtggctggctcaattcttttaccataatgaagtgattgatccgttaaaggaactacgtgatgatttgggtactaaacataccaatacattcattccgaaagtgatagccgaagctcgcaattatgaattgacagaggatgagaacagcagaaagttatccgatttcttttggcatactatgatagaccatcatacatttgcccctggatgcagtagtgacaaggaacattattttgacccggcccggttctccaagcatgtgtcaggttatactggggaaacgtgttgtacctataatatgttgaaactgtcccgtcatttgttctgctggacagccgatgctgccattgcggattattatgaacgggccctttacaaccatattttgggacagcaagatcctcagaccggtatggtaacatatttcctgcccttgctttcaggctcgcataaggtgtatagtacgaaagaaaattctttctggtgttgtgtgggaagcggttttgagaaccatgctaaatatggagaagctatttattatcacaatgacaaaggcatttatgtgaatctttttatcccctcggtggttaattggcgcgagaaaggattgactctccggcaggaaacggattttccggcagaggagaccactgttctgaccataagagcccaaaatcctgtagagactacggtttatcttcgttatccttcatggagcaagggagtgaaagtgtttgtgaatggcaaaaagatagcggtgaaacagaagccaggttcatatattgccattactcgtctatggaaagacggtgaccgtattacggctgattatcctatgtgtctccgtgtggaaacgaccccggataatcctcaaaaaggagcgttggtttatggtccggtagtgttggccggtaagcggggaacagaaggaatgcaggcacctgcgcccgattccaatcctgctttgtacaatgattattatacgtatgattatcatatccctgcaggacttcgcactacgttaaaactcgatgtcaagcatcctgaacgcagtgtacagcgtgtcggtacggaattaaagtttacgacttcgcaaggagatgtgatagaaccgttgtacaatattcatcggcagcgttatgtggtatattgggatttggagaaagaataaatttcattattagatgagtaaatgaatcctttgattcgtatttatatatggtttgactaatcaaatgatataggaatatgaatagaggattcgtttttattttgatattggctgttggcttggttgtgacttcttgtttacggcaaggtaaacagaatgtaacttatgattttacccctttggattccataatcagtacctggatggataagggatactatccggggggagcaatatgtgtgataaagaatgattcagtgttgtttgaaaagacgtatggctctttcaccggagatacaaaagtgtatgtcgcttctgccggcaagtgggtggctgctgccgtaattggtgcggtagtggaccggacggatttgagttgggatgatcctgtagagaagtggttaccgcagttcaggggcgatgcgaaaggcgatatccttttgcgtcaattactctctcatacttccggtgtacgtccttacctgcctgctccccgggtggacaattacaatcatttggattcggctgtcacagagatattgcctttggatactgtttttgcaccgggaattcgatttgaatatggaggattggccatgcaaatagccggacgtatggccgaagtagctatgggggaagagtttgaatttttatttcagaaattaattgccgttcctttggaaatgactggctctcattttactccggttaatactgacgggggacatgctcctatgttgggaggtggattgtgtaccacgctgaatgattatatccgtttcttgaaaatgatttatcataacggacgtttcgggaacaaagagatattgaaaccggaaacagttcaaactatgcaggtagatcaggtacggaatgctgttgttgctcctggtgagtatgttgagaaagcgttaggacagcaccacactggtatctatggattaggtgaatggcgtgaactggttgatgagactacaggagaagcttatcagattagttctcccggatgggctggtgcttacccgtggataaataaacgtgatagcgtgtatggtttctttatagctcacgtacagggaggagctaataaaaaagacggcttctcttctttttatggcagtcctgtcctgtctgaaacggtaaccaagatagtaaatcaataaatgagtatgaaaaatattttagtaacctttattttatggatagggtgtatgtcggctgttcaggcgcagcaacacccttgtgtatatgtttctccggcggatagagcgtctgttctgcaaaaagtgaaaaatgagccttgggctggggaagcctttgcagctatccgctccaaagtggaaaaatatgtggatcgtcatcagactgatcccgaatggataactttccggctggccatgtattggaaagatggagagcgctatactcaatgttatttgaaaaaacagaattgggactatggagaggggaatgctcctgttcccactgtaagaatgccgggaatgcgtacttggaataagtatgtcaatgttccgttggaggaccgcacttcttataatgaaacaggtgatatgtggggaattaataaattaaatccttcggagccttcggtcaaagtgccttataaggaaagcgggcacatgatacgggggaataatgtcgagatcttgacattagcagaaaatgccgcttttgtttattgggtgacaggagaagagaagtttgcccgttttgccacagatatatttaatgtgtggttggtagggacgtattatatgaatcctattttggaccctgaaaagtcgtgtggcagtgtcggtggttgggaaccgggaggtatttgcggctattatgattacgaacagatacatgatgatttggtaatgcatgcggcaatggcgtatgattttgctttcgattatttgatacggcatcctcatgctcatctgaaagcaattgggaaagatacaaaaacggtagctgccgaagtctttaagcgttttatcaatatagggctggtacgcggtggcaaatcgggtaactggaatgtgaacgggtggaatataatgctgcgtcctatgttggtgctcgatcataatgaggcttatgctgacggtaaaggaaaagagtattatttgaatctgctggtgaacgaatctactccctatcatgatgccattcccgatatattgaaaacttacgatcgggtgacagggctgtggccggaatctcccggttattcattcggtacagtgcagtcattgcttgattgggcggctcccttgaaacgtgccgggatagatatcatagccggtaaccccattttgcagaaagctgcaatggctgtatttccttggatggacgatgcagccaatatggtggtgttcggtgattcacgtgggggaagtgctaattttcagacgtttgaaaatctgctgacttattataccggaacagataataaggagggggtggaaaaagtggcaagtgccttgaacaaagggatttctcaaaagaaatactccagaaataatgccggttggacagggctttgtacctatacagctaccatcccgtctgtacgtgcagagagtaatgagcgtgcgtcttattctccccatcatcgttttattacaatgaagaactgggagggagattataaaatgatgttcactctgtatggtggtaaaaaaggataccatctcactccgaacgggttggctttacaattctatgcgtatggttatgcgttggctccggatgcagcggcttatgagtcctattggagcaaagatcatggataccatcagtctcctacaggttctaatacggttttacccggatatacggaaggagatatcactattcatgctatggaacctatggtgaaggagggagaattcgtaaatgatagagaattaactccttacctcaactttgccgatgtgtctgccggtgagaaaagaagaatggtcgctatggtccgtacttcggggaatagtggttattatgtggatattttccggtcggacagggcggataatgattatttgttccatcatgtaggtacttcgatggaaatcactgattcggaagggaacaagcttcccggtgaggctttggagaagtttgacaaaacgtggcatgaaggatatcattggttttccaatctgcataaatccgattataaccagaatttcatcgcttcatggagtatgcccgaagatataacggcgcgtttatggatgacaggaggtgagggacgtgaaatttatcaggtggatgctcccccgactacaatgaataaagggttgactcccggcgatatttgtatgcctcctatgccgactcctgctttgattgtccgtcaggaaggtaataatgctcatactcatccttttgtttctgtttatgaagcgtataaaaagagtggtccgaatgtgctcggtgtagaagccttgcagggagatgatggctgtaccggggtgaaggtgaatacggcggacggatatgcggattatctgttcagtgcgacggacatgcaggctcatcatccttccaaacgtgtttcattctgtggcgggttaggattgataagagaaaaagaaggtcagattcaactgatgtatcttggctgtggccgttcactaaagaaaggtaactttgttttagaatcggatcatgacgtatatgctgcaatctatatgcagcatggtgtttggtactattcagcaaccggtcctgtacgggtgaaaataggaaaagaaaccaaagaactgaatgaaggttacaatcaaaaattataatttttttgtgcatccttattcaccgcagggactaatgctgaaggtctctgcggtgaattgttttatcctatagattttatttttcttttcgttgagtgagttttccgattcatccgtactactaattaaaaagtaatcattatgaaaaaaataatactcatagcatatgcgttgacctgtacggcttcgctttatgcaggtcattctaaagaattgaaattgacgtccccggagggagttcatgaagttatgttcaggcaggagaaaatttcttcttcagtaaatgaaatagtatatcaggtaaagtatagaggcagagaggttatcggaaactcccgtgccggtcttcagctggataaccgtacttgggaactggcgcttgcccgtaaaataaatcaggtaaaatgttggatggataatttggaggtggatagtgtgatctatcagcctgctgttaacaagtcttggcatcctctgtatggagaacgtagtacggttcgcgaggcgtataatgaggcaaccatgtatctttccaaaaaagatggttccaattatcgtttgaatattgaagtgcgcgcgtacgatgaaggcatcgctttccgttatttttttcctgaacatccacaggccatttttcataaagtggtgggggatctgactgaatatacattttcccccggtgcgatggcgtgggcggagcaatgggcgcaagcgccttttgagcaccttgccattaacgatattaaacagccggtggaacgggctttgactgtggaactttccaacgggctgtgggtggctttgactgatgccgatgtagatgactggtgtcttactaaattggtagcttctccgactaaacagaatacactgacttcggtcatgtacagtcctgtggatattgtcacttattacgctaccccatggaaagttatcatggcagccgataaaccgggagaattgctggaacacaatgatatcatccagaatctgaatcctccttgtgagataaccgatacggactggatcaggcccggaaagattatgcgtgaaacgactattaccactgaaggggccatagccacaattgatttctgtgccacccatcatattccttatatgttgtttgactggcaatggtatatgccttgtacttctcatgatggagatgccacaaaggtggtttccaaactggatatgccgcgtgtcattgcatacggcaaagaaaaaggggtaggcgtatgggtgtatgtcaatcagcatgccctgatgaaacagatgcgtgagctttttccattgctgcataagtggggagtcgtaggtgtgaaatccggcttcgtacagtatgccagtcatcgttgggctacttggctgcatgatatggttcgtctggctgccgaaaacaaattgttgattaatattcatgatgagttccgtccatccggtttcagccgtacttatcctaacctgctcactcaggaagggatacgggggaatgaggaatttcccgacgctacgcataatacgattctgccttttacccgtatgattaatggagcggcggattataccatctgttatttcgacaaacgtctgaagaacacccatgctcatcagttggcggcttcattgattttttacagtcctttacaaactatcttctggtatgaccgcccctcattctatcaaggggagcccgaaatagaatggttcgagaatctgcaaaccgtatttgatgatacaaaagtattggaaggtgctccgggtaagcatataactatggcgcgtcgcaagggtaatgagtggtttgtaggagctttgactaataatgaaggttctgctcaatcggtaaatctttcatttttagataagggaaagacctatctggcccgtatttatacggatgggggagataagataaagacccgtactcaggtgaaatgtacccgtctgttggtggattcctctcaaatcatgcagtttgcattgaagccaggaggcggtgcggccatgcaactcgtgccagtgacggatcaggaaataaaagaatataaaaagtataaaggacaagtattataaaaataaccactttcgttgagtgtattggttttcttgtccgtattatagacagattaggttaacaaatgaaggttaggtgattttttaagtttaaaggggtatgttttttaaggtaagaatgattgtttcagggcatttttataataggtaagaatgaaaaaaatagtgattatagtggctttagtatgcggtgcatggcaacaggcagatgctcagtatgtatcgaaggtatgggtgtccgatcagaaggacggtacgtatattaatccgattattcatgcggattactctgacccggatgtttgtgccgtaggtgatgatttttatatgaccgcttccagttttggctgcaccccgggattgcccattcttcattcaaaggatttggtgaactggcgtttggcaaactatgccttgaaggagatagagccgaccattttctttaacgctcctcaacatggaaaaggggtatgggctccttctatccgttaccacaacggtgagttttttatctattggggagatcccgactggggtattttcatggtaaagaccaaagatccgctgggtgaatgggaaaaaccggtcttggtaaaggctgggaaaggaatgatagatcctactccgttgtgggatgaggatggaaaagtgtatttggtacatgcgtgggcgggcagtcgcgccgcattcaatagtgtgattacggtttgtgagatgaatgcggaaggtacaaaagttattagtgaacctgtattggtttttgatggcaatgatggtgtaaatcatactatagagggacctaagttttataaacgcaacggatattattacatcctggcgccagccggaggggtggtgacaggttggcaattggcacttcgctctcgcaatgtgtatggcccatacgagtcaaaaattgttatggcccaaggagatacggacataaatggccctcatcaggggggatgggtggaaacctgtacaggcgagtcttggtttatcaattttcaagataaagccatgtatggcagagtcttgcacttgaatcctgtgaagtgggaaaatgattggcccgtaattggggaggacaaggacggtgatggatgcggcgaacctgtaaaacgctataaaaaaccggatgtaggcaggatttatcctatagagacaccgattgagagtgatgaattcaacacaaggcaattgggcttgcaatgggaatggcatgccaattatcaggatacgtttggctttacctctgatttgggttacattcgtatatatggacatattttgtccaaggattttgtaaatttttgggaggtgccgaatctcttgttacaaaaattccctgccgaagaatttacggcgactgccaaactgaaagtttctgcgaaagcggacggacagcagtccggactgatagtgatggggtgggattatggctatctgggtgtagtaaaagaaggtgataagtttatattgaatcaagtggtctgcaaggatgcggagcaacggtctcctgaaacagtgacccatcttgcggaattacctgtaagccgccggttcggagccgggctctatcccaattatgagcgtgatatttatttgcaggtgaaagtaactgggggaggtatctgttatttcagctacagtctggacggcaggaaatatacattggccggtgtgccttttactgctcgtcaaggtaagtggataggagcgaaagtaggattattcagcacagctccttatggcaaggaaagaggttgggtagatgccgactggtttcgtatcgataagtaaaaaaagaaaggataattatgaatacaaaaaatctattagtaggtatagggttatgtctgctttcagcctgtactgaagtagacaacaaactggaggtgaacagggctttggaatattgtgatcgccaggtacatcgtactttggaggttatgcatggaaaagggcgggaggtagattacactatgatgcctcgtaacataatggatggccagtatgactggaactatcgtaaagtgagtaaggaagaatggtgcggaggtttttggccgggcatcttgtggtatgattatgaatatacacaagatccgaaaataaaggaagaggccgaaaagtttactgcttctttgaaatttctctcggagattcctgcatacgatcatgatttgggttttttggttttttgtagctatggtaatggttatcgtctgaccggtaatccggaatataagcaagttataatcaatacggctgattcgttatcagcattgttcaatccccgtgtaggtactatgctttcatggcctcgcaatgtgaaaatgtttggcggtcataataccatcatggacaatatgatcaatctggaaatgcttttctgggcagccaagaatggaggtaatccttatttgtttgacattgccgtggctcatgcggataagacgatgaaatatcattttcgtccggattatacctcttatcatgtagcagtgtatgataccctgacaggtgaatttatcaagggagtgacccatcaaggttattcggatgacagtatgtgggctcgtggtcaggcatgggctatctatggttatacagtcgtttatcgggaaacaaaagatgtccgttacctcgattttgtacaaaaggtaacggatgtatatctgaaaaatctgcccgaagactatgttccttattgggattttaatgatccgtccattcctgatgctccccgggatgcttctgctgcttgtgtggtagcttctgctttattagaattgtccggttatctgccggctgaaaaagcattggaatataaacaggcggctgtaaaaatgctggccagcctgagttctgacaaataccagtgtggtaaaagtaaacctgctttcctgcttcattccacaggacacttgcctgccggatcagagattgatgcatccatcatttatgctgattattattatatggaggcacttctccgtttgaaaaggctgacggaaaataaaccggtcattgacgaataatagattgttcagggaagtataagtatatagagatctgtagtctccttataggtggattatttatgataagtatatcccgtttgcatcagcaggtgaaaacgggatatactgttttacagcaggtaactaaagcttttagtttactttaactatgaaaattagttttataactaaaagttttagttctttgtgataatcaaaagaaagattatgaaaatgttgacagcaaaggaagaagaaattatgggttatttttgggaaaaaggcccgttgtttgtaaaacagttacttgatttttatgatgaaccgcgtccgcatttcaatactctgtctaccattgtgagaggattggaggaaaaggggtttctcagtcatgaggtatttggaaatacctatcagtattatgcggtggtaagctgtgatgattttaagaagaagacgttgaaaggggttatcagtaaatatttcaataactcttatttaggagcggtttcttcactggtgaaagaggaggagatttctttggatgaattgaagcagcttatccgggatgtggaaaaggcgcatgaataatccggataaagagaataattaaaaatacatactatgggagcattttttgtatatattgtaaagtcggcagtctgtctggcggtattttatttattttaccgcctgttgctgagccgtgaaacattccatcgttttaaccgtattgctttgttgggaatactgatattgtcctgtgccattccctttgtggaagtgaccatgaaagaaccgatggaagtcagccaacaattgctgacttgggaagaactgctacttatggctaatcttaatcggactgctactatagaaactgctcccgaatctgtcattacatggcgtgaagcgctgctgatggtttatttgttgggtattgtattcttctttttacgtaatgtatggtcgctgacccgtatgctgaggctgataaagggtagcacccttgtccgtcaggaaaatggcatcacgctgattacccatcagaaaaaaatcgcacctttcagttggatgaagtttgtagtgatctctgagaaagacctgaaggaaaacggtgaggaaatactgacgcatgaatatgcccatatacggaagagacattccatagatttacttatagcggatatctgcatctttttccaatggttcaatcctgcctcctggttattgaaacaggaactacagaacatacacgagttcgaagcggacgaaagcgtgattgcacaaggtattgatgcaaagaaatatcagttgttattaataaaaaaagctgtcggcacaaggctctactctatggccaacagcttcaatcacagttcacttaaaaaacgtattactatgatgttaaaaaagaaatccaatccgtgggcacgactcaagtacctgtatgtgcttccattggcagccattgccgtggcagcctttgcccgccccgaaatctctagtgagttagatgagatttcagccgtcaaagttaatgatttaacggcaattatgaaaaccgaagaggttaaaagtcccgaaaaacatcctgcaaaggaaataaaagtgcaagggcaggtattagaaaaaagtacaaacgctccggttgtaggtgctagtgtgattatcaaaggtaccacttcaggtacgatcactgatttagatggaaattttgttatatcaatgcctgttggggctactttgagtgtttcatatataaatatgaaaacaaaggaattgactattacagagaaacttattggaaaaattaaatctttaaaagtgtatttggagggagaaatcacaactaagacacaggaagtggttgtagtaggttatggaggtggtgaagaagcttctgatgaagttccggtttttcgggttgttgaagagatgcctgagtttccgggtggtatgggagaatgtttgaaattcttggggaagaatatcaaatatccagtggaggctcagaaagctggagtacagggaaaggttattgtacaatttgtagttgagaaagatggtaatatagccaatcccaaagttgtcaggagcattgatccggatttggacggtgaggccatccgagtcatttccattatgccgaaatggaaaccgggtatgcagaaaggtcagcctgtgcgtgtgaaatatacggttcccgtcactttcagactagacggtaaagatatcaaatcaaatgaagcacgtcatttggagttgaagacagacactgtttttcaagaaaatccattgcggataggtaaggaaactttttcgttgaaagattggaaggagaaaccattgcttatagttgatgggatagaaaagccttatagtcaaatggaaaaaataaatgtttcggacattgaatctatttcggtgttgaaggatgcggcaggtactgccatttatggagccaaagccaagaatggcgtgatattgattaccacaaagaaacaataagaataaagatatgaaaaaatttgtaacactgctgctatgtatgctccccgtttcgttgtttgcccaggtgaatgatgggattcgtcaggcaatggataattatgattatgaaacagtagttacgctgattgaacccgattgtcaggattctttgttgctgattaccaaagctcaggcgctgaaagcgatgaaccgttatccggaagccataggggtattgaactctcttatcttgaaagacagcacaaacacaaaagttttgatcgaccttgccgagtgttacaaattgacgggtaactcccgtcgggcggccaactgttatcagaaggcaatgaatttgcaaccggaaaataaatttttccggttgcagttcatacgctctttattagcttccgaagattatgaagaagcgcgtacggcttgtcatggctggttggaacgcgattccttgtcggccaccggatacaaatatctgggacaggcatacgagggattgcaggatgccgccagtgccttcctcagttataacatagcctatcggcgtgattcgttggatgcccagacagtggcacgcattgccggtatttttaataacaatcagcagtttaaagatgctgttgatgtgacggaagtttatcgtttgtccgataccaccaatatagatgtgaaccgccagaatgcgaaggcttattgtatgctgaaagagtacggaacggcggtaaaacgctatgagtcattaaaagaactgggtgatcgtagttttctcactctttactatttaggtgtatcccattatggggataactggttttacggtgcatacgataatctgaaagaagcttatcaaaaaaatccgatggatgtgaatgtgctctattatctggcaaaagcttcggcacgcacttcctggaaaaaggagggtgtggaatatatggaagaagccttccgcatagcagttccttctgatagtatgatggtacgtctttatgacgggttggtagaatgttacgattatgcgggggatacaaagaaagaggtggaagccttggagaagttatatatttatacaaagaaaaactccattctttataaaatagcctgtctctatgattggaaagaagatgagaagaatgccattcgctattataggaaatacatggctacagtttccgaagatcagcgttatgccttggacgaagacgggaacccggtggaagaccgcataacactttaccagcaggcatggaaacgtatcaaaaaaataaaggaggaaggtttctttagaggtgatattccgacaaagtcatttcctgtagagaaaaaagatacgttggcacttcgtcatgcaaaataacggaagtcatttatataaaagtaagaatatatgaagaaaattttagctttggcactctttgcagtggctctagtgtcatgccggcaaactatgcagaccgatggctttaaactatccggtcatttggaagggcttcaggttggagatactctttttcttaaaacttttttattacccgattggaaagaagacgggacagataccatattggtggaaaaggaggggattttctcggcttttattcctatggaacatactactttttatttattgacgcatcagcctaaagtgggtgaaccgttacggagttgtattcgcggagctgagattatagctcgcgtaggtgatgatataaaactggaagggtctttggattacttgggtgcggttcgtcattcgggtggcttttatgacaattcgttggtggctaggtatgatagcctgactgcgtcttccaatactgaaatgattgatatcttcagtcagatactgaaatatcaggatacaaagcaaaatgatagtgtggcaaaatacgggcaaatgtataatgaatatcatcgtccgctaatgctgaagactgttcgtgatagtctggcattgaaagtgaacgatatggaatatgccgcttttatgtatgcatccgcttttgtttttgatgctacttataaggatgtgaaagagcgtttggcacaatttactccagagattcaaaattcatattttggacaaatacttgacaagcaattgcttgtattgaagaatattgaagtaggctttgcgccagcggagtttacagtgacagataaagacggccggaaggtgtttttgtctgattataaaggcaaatatgtgttgatttatcattggggattatgtcctggtactttttgggtaaatcctaaaataacggatctctatcaaaaatatcatgaaaaaggtttggaggtattgggatttacccgtgatgatttgttgaaatcgttgcagggaagttctgaagagtttaagaaagatgaacgggtacagggattgctaagccatccgtggactacagtttacacagaggatgagggcaacggctttatagtgaaagacctttatttttcaggagttcccattcttatgttaatctctccggatggtattactttggcccgtggatatacaaaggcatacgaagaagtaaagaatcttttggataggaacttgggaaataagtaagtatgttaaaaaaaaagatacaatgaaaaactttggtattttactgcttgctatggtgagttgctgccttttgcaggcaaaagacagggtggttaaacagccgcctttcatcgctcgtagctcttctactatcgagatagacagagtggtggtttcggatacggcaaccgtattggatgtaaaagcctttttccgtcctcataattggattcagataagtaatgaaagttatttgttggctgataatggagagaagtatccgattcgttccggtaatggaattaccttgggcgaaaaattttggatgcccgatagcggtgaggcttcttttagtcttatttttccgttattgccccctacagtgaaagtgattgatttcattgagagcgattgtgaggactgtttcaaggtatggggaatccatttggatggtaaattaccggaattggatttatcggatgatgtgaagaaacagaaattgaattacgctgaaccgttgcctaaggctgaattgaaagatggcaaatcagtgataaccggtcgtttgttagactatgagaagcactatgcacttccgttttcttgtaggacttgtgatttgttgacggcaaaatttgaggatactgaaataaaggtgaatgaagacggaacatttcggacagagattgaactttgtgctccgactacggtcagtttttctgtgggacgtgatatttattttgacgtctttttggttcccggtggtgaattggatatggctgtcaacttgcgtgagttgagtcgttctgaaagcaaattgttgaaaggcaagcgtgctggtggaaagaaagtctatttttcaggtaccatggcggctttgaatgatgaaatgataaccgatgatgaacatttgatggatgtatggggaatggttcattggaatatgaatgatttatataatatgactgccggtcagtataaagcttattggttgaaaaaatatgaagaaaccaaatccgctatctgttccgataagaaaagaagtcaggcataccgggagcttttattggctcagaatgatttgctttgtactttgacattgacccgtgtaagttctaatttagcctatgcttatgtgcagtgcagtggattaccggctcgtgaagcttatcaaaagtttaaacaaccggaattgagtgatgatttctatgactatatccggcagttgaatatactgaactcgcctgtcatgctttatgccaatggttatgctgatttggtaaggggaatgggctatctgagggtgaagatggatgatgagttgagtgatatatttgcgtttattctctcttccgataaagtttctgctgaagatgctaagataatacgtgagttcaaggctgatacagataccggaaaaacatctgtctatcaggaaaaaatgggcgaattgcgaataaaatacgatgaattgtttaaagaattcagttctatgcagcaagactatattttgaaaaagattatagccggatatttgggcacagaccaaggactttttttcgacttgcagaaaatgatgaaatatgctcagaaaatcagtgacttcactccattgactgtacatgattttgaggagatacggaagatgagtgacccttattatctcggcagactgacaaagatgaacaaccgtcttttggaaacgattgatgctaataagaaaaagaaaggttataccgttaatgaatccggagaagtaaaagatgaagatttattttattccatcatttctaaatttaagggtaaggtgattttggttgatttctgggcaacttggtgcggtccttgcaaaatggctatgaaacagatgaaaccgatgaagaaagatcttgaaggtaaagatattgtatatgtttttattgccggagagaactcgcccaaggaaacgtgggataacatgattccggatattcatggagagcattaccgggtaacggcggctcaatggaaatacttgagcaagcagttcagcatacagggcgttccgacttatattattgttgataaggagggggctgttattcaaaaacacaccggttttccgggggtggataccgtaaaaaaagaattaatgaaagcattggagaaataaagaacgtgttcgttctgcaagaataaaatgaataagaatctgtagatgctgttgggaagtaagcatttacagattcttttttttgattgcatcttttctttggctatattgattacagattttctccgctgatttattgggtggcttttcataatgtagaaatctgactttctatgatgttttttttctttgtttaaaaaataaaataatattgcttcttttcttaactattaataatatatttgtgcagattttgtatgcgatgtcggaaaaagaactgattatattattaaaaaatggagatgaaaaggcatttacaactttgtatagattgtattggtctaaagtttataatttctctcgtctgtatttgtcttccataacagaagttgaggaagtggtgcaggaagtgtttgtgaaagtgtgggagacacgtgattttttacgtgcggatgataattttaagggatatctttttattattacacgcaatcttatttttaatcagtttcgtaaaagtttcaatgagaatgcctataaacttacggtgttgagtgctgcaatggattattatgatatggaagatgagctaagtgcagctgatttaaaagaatttattaaaaggatggtgggtgagttgccacctcgtcaacaagaagtttttaagatgagtcgtgatgaacatctgacctacaaagaaattgctactcggttgaatatcagtgagaaaacagtagaacgacatattaatgaagcaatcaagttcttaaagaagaacattatgctttatctgatttttatcttttaaataatcatagtttatttttttttagcaaaaatgtatccttgcattgggggtatgtcttttttggcgtgtatttatagtaagtacaggggaaatttatggatgaatttccgtagggtatcaaataaaggatgaaaacaaagaacgaagatattataagaaagctgtttgaaagcaaatgctctttaagcccggaggagcgtgcggcattgaataactatgaatatgtaaatgatacttttcatagacaatgggaagaaatgtccgaagaggcagtggatttggtgagggaagaaaagatactgaatggtattatgaagaaagtaagagggcggaggtttccttttataaagaaatccttttataaatatggaatggctgcgatgattgcagtatgtatggtgctttcagctttgttgttgatgaaaaatagtggtgaagaaattatatatgtagtgaataccggataccaatcaatggattccgtgagattggctgatggtacaaaggttatgttgaatgcaggcagccggcttacttatccaaaagagttttctggggagaaaagggaagtacagctttcgggacaagccttttttgaagtgacgcctgataaaacacacccttttgttgtaaaaacccagaaaatggacgtgactgtgttgggtacttcttttgaagtgtttagttatgatggtgatgaggagggcgaaactgtattgttgactggaaaagtaaaagtggaagtacttgaaagtaatcaacagaaaggcggaagttatgttttgaaaccgaacgaaaagttgacatatagcaagactgatggcattagtctcactactattgacgcggatgcttattcatcttggcggcaaggaaaaagaatgagctttaaaaatgagacattagagatgattttggaacggttggaaaaatggtatggacaaaagattgaatgtgtcccccatattgccagacattatcgctttacttttacgatgcacagcgaatcattggatttgattttgaattatatttcacacagtgcgccattaaattatagattaataagtaatgatcattatatcatagaagaaatgaaatagtaattataaaaatgatagtatgaaaaacaattgtgaaaactactgtagacaggcttgactatccatagtctctatcactgtattttgaaaatcatgttgattttagtctaataaagaattatgtatttatgaaaaaaacgaaccagcggttattttatccgcaaaaagtaaaaaggcaacttttttgtgccttagtggcgtgtgctgtttgtgcaatacctgttaatgcccaatctggtaccatctcattgaataagtcaaatgtttccatgcatacgattatgcaggaagtggaaggacaaagtgactatacttttttctataatgacaatcagatcaaactggacaaaaaggtttcagtaaaggctcagaatgctactattgaacaagtcttggcccagatgtttaaaaattctggttatacttataagatagtaaataatcagatcattgtgtcaaaggcgaatgccgtggctgctgtagaaaaacaacaacagcagcaggcaaagaaagtgaccggttgtgtgaaagatgctttgggagagcctatcatcggtgcttctgtagtagagaaaggggctccgaccaatggtacgattaccgatttcgatggtaactttacattgacagtctcgggtaatgaattgcagattagctatatcggctatcttcctcaagtggtaaaagtgcaatctggagttacttcttataatgtaacgttgaaagaagacacgaaaacactggatgaagtggtagtgattggttacggtactcaaaagaaagtaaacttgaccggtgctgttgcttctgtcagtacagatgatatcaaagaccgtgtgcagactaatgttttgtctgccatacaaggaaccgttcccggtgtaactattatttctcgtccgggttcaacaccttctattaatttccgtggtcgtggtaatttgggaacttctgctccattatatgtgatcgatggtgctattgcagatgctacggtattttccaatcttgatccgaacacgattgagtcaatttcattcttgaaagatgctgcttcctcggccatttacggttctcgtgcagcctatggagttgtattggttacgactaaaggaggaaaggcagagaaaatgaatgtggcttatagtggatatgtcggagtcaaaactccgacttatttaccggatgtccttgattcatgggattatgcgaccttattaaatgaagctaaatataacgccaatccttcaggaggaaaaaatcaggcttatacgaatgaagaaatcggatggtttagagatggcagcaatcccgattactatccaaatacgaattgggctgatctggtattggacaaacatgtgctgactacccaacattctttgaactttagcggaggcagtgagaaagtacgtttctttagcagtgtgggctatgtatttaatgataatttcatgccgggggttactgacgatcgttataatctgaatcttaaccttcaaagtgatgtcaccaaatggctgactttgaaaaccggagtgaagtatattcgtaatagttccgatacaaaaaacggcactccatggattgccaattttgttttggttccttctattatggtggctcagcagtctaatggcgaatggggtagtatagccggaggtaaggatgcaacacaaacctttatgaatagtaatccactccgtacgcttagttttgacaactggagcaaaagtactacggaaaataccatgtatgatttgggttttgatttgaaacctattgagaacttggtcatttcgggacaattggattataagcgttatgaatataaaagcaagagttattcggctgagtatcctgaagtagtacattttgaaacaggaaaggaaattcccggtacgggcaacagtagtccgaactcaatgagtatgtattggatcagcaacagcaatatgatgactactcttactgccaagtatgatttgaaactgggacaacatgcggtgaattttctggttggtacatcctacgagcattataagtctgaacggttatatagtaaacgaacagattttgtaagcgatggtctggaagatatagaacaaggtaataatatttcaaaagatttacctgatggacgtggtattgtggagagcaaaatgctttcttactttggtcgtataaactattcatataaagaccgttacttgtttgaagccaatcttcgtgctgatgcttcctcgcgtttccataaggacaaccgttggggatggttcccttctttctccgccggatggcgtatcagcgaagaatcgttcatgaaaccgatagcttggctgaataacttgaaactgagagcttcgtatggtacgttgggtaatatcaacaatgtaggatattatgactattttgaattgctgagcagcaatgcaaattataattttaatgatgagccggtgaagggggtgcttgaagcgcagattactaacaagactttgggttgggagactgtagctttggcggacttcggtttggatgtagatttgttcgataataaactaagtgtgactgccgattattatatcaaaaatactaaagatatcttgttgggctataacgttccggcagaaacgggtatttggacaaaaccggttatgaatttggccaaagtccgtaatacaggttttgaattggcagcaacctaccgcaataagattggtgacctgtcttattctgtaagtggtaacattgctactaataacaatgaaatcgtaaccttggccggatcagacaatatgatacagaatggtggagatgtagtcagatatattctgaaagaaggagaagccatcggttcttattatggcctggaaacggatggactgtatacccaggaagagattgatgcgggacattattataaatacggacgcaagcctaatgccggtgacattaagtatgtaccccagcgtgaaaatgtggaatggggagatgacattaccgatgatgaccgcactattattggcaaagatgtacccgattttacttatggtataaatatcaatttgcaatggaagaattttgaattgtcggcatttggccaaggcgtttccggtaccagtgtggcttttgagtcagaacaggtgtttgcctttatgttgaattctaatccgagaaagtatcatttaagtcgttggaatgaagataatccgaatccaaatgcagcatgtccccgtttgtatggaggtaattactatgatgaatataataagcatttctctgattaccagttatttgatgccgattacttccgtattaagaccatcagcttgggatatatggttccgaaggatgcggtaactcgttggggattgtcttcccttaaattcttccttaccggcgagaacttgtttaccttccgtgccgacaaagacatgaaggactttgatcccgaatcctctaccggacgtggtatcagtgcttttggtgctaaatctgtagcctttggtgttaacgtatcattctaattcaaaaaaataaaattatgaaattcaacattaaatatatcacattttctgcactgctgtgtgcatctatggtttcatgtgatttggacgttgttccaccttctgatatatctaccgagactttctggaaaaacgagaaagatgcttggaatggattgaacgcgttgtatgcagaactcccgggcatggatatctgggatgaaatgtataccgataacgcgcatagccataaaccgtgggaaggtccctatgagttggtacaaaccaatggtatcacggcagggaatgattttggttatggttatagtacagtccgcatagccaataattttatcatcaatgtagataaatgtgatatcagtgaaggactgaaggaacgtatgaaggcagaagcccgtttcttccgtgtctggcagtatttacaactgactacgaagtttggcaaggcctatctttttactgatgtgcccgaatataatgcaccttatgcaaaacgcgatccggcagaaaaagtacaggcttttattttgagcgagctgaatgaaatagccgaaatacttcctgatgaatatgatggcagttatttgtatgagtcaagccgtattacccgtgccgctgctttggctttgcgtgcccgcgctgccctttatttcggtaactatatagaggctgaggcttctgccggcaaagtgatatcggaaggacatcattccttgttccgtgtaacttctttgaatgcggcacaacagcaggaagctgatgaaatggagaaatatattgattttgctgaagtgggtattgacaaagacaagtttgtaaaaggattgttcagttatgaaaccttgtggcacaaagagaatgccaatccgggtaatcctgaatatatcctgacacgtgaatacatggcagatgataataactgtgattggactcgttatacatatattcgtcccagtcagatgggatctggatactcttcttttgagcccatgcaggatctggtggatgcctattggagcattgatggaaaaactcttcctgaaattccttccgaagaaaccagacgtgcacgttttgccgatatgtggatgaagtattttgcagagccggtgggagaaacttataaatcggttgctccggcagtgttccgtgaaaaggtgcctacattggacatcaagtcaatcccttatatgcaggagttccgtaatcgtgacagccgtttgtatgcttctattttatttccattgaaaggatggcaggaaacggacttctccggtgatttctattatatgtgggatcctttgaaagccggatcagatggaaatgaatcttggaccggatataattaccgtaagttggtttctcttactccttatcaaggttggcagagtgtggaggattatccgatcattcgctatgctgaggttttgttgacttatgctgaagctcgtgtacaaaataatggttgggatgaaaaagttcagcatgctttgaatgatttgcgcgaccgttgcggtatgcccaatgttccgaacagtctgtcaaaagatgcggctcttgagttggtacgcaatgagcgtcgtattgagctggcagccgaaggtcatcgttacgatgatatacgtcgttacggattggaatattgtcgtgaggcgatgaatggcgaaagtacagcaccttgtggaggatttgatccggtgaaaaaagaatggcaaaaatatgttgtaatagataaagtatggggagatcgtttgctcctgatgcctattccgacttctgccatggacgtgaatccgctgttgaaagatgaccaaaaccctggatactaatgttttctgttttcttcaacttttttgaataaacaatgaaaaaggcttgtttttccatgtccaatggacagcaagcctttgtttatccttctgaatgacaatgaatggaaatacatggattctaaaaaaatcacttccactagggggggaaggtcctttataggcgtatttattatgtgttcgtgcataaaccgattcatttattatttatttatcctcaaatccgcaactacgcgcctaatatgatacagaagcgaaaagaatctgcatcgttagtaaaaagggggcacagtgcatcgaatgtcaccataaagacatataaatgccccttaccccaccatgcgacttgaggcaatacgcaaaatcacgactataagttgtcggtgttatccaaagtcattctggaacacattggcataagcattgttgcatgaatagatattcagcacatacttccttgatgtcctgacccatttggctggcacagagatgaacttaaagacaaacgtcttgatgcggcttgttgctttgagtccgaacctcttcacgtcaagcctcgccatgatgaatttatagaagttgcgtatgagtgccataagcagaagaaacaccgtgttttctcccataaaggattttggaagcctgttccagccgaatccgttattcatatcatcgaagatgcgttccttccctccacggaggttatagaattcgacaatctctttctcggaagactcgtagtcatttgtaaggatgcagcggtaggtgtattctccttcccacaggtcgagttcgccgtctatccgcttctgtctttgaatcacaagacggtatgccttccctttccatttctcgatgagaatggaggccagctcaaactcaatgccgcccaattccactttcttccaacctctgagggcaaagatgtcattgtagagcgaactgcatcggttagcacggatatagaaggtcttgcagtgtttagcaatctcttccactatctcttcagaacacgagccgcaatcagctctgaaacggttgataataagcttgttttgttcaaacctttcaaagaacctcttcagcgtgtccttctggtggaaacggacatttgtgttgccgtcgctgttctcaatgccgacaatcaagttgccaataaccgccacgccagggcgataaccaaggaacttcttgtatgtaggcttcgcatcaaacttctcagcctctatgaactggtggtcgaagtcaacgtcatacccctcgccctctttcagctgccctgtggacaataggcaattgaggagcagtgtattcagcttgtctgccgtgttgaagtcgtaggtcttgccagtgtcggatgtgtaggaaatgttatcctgggtcagttcctttatggctctaagaatcgtgtcggcactgcatgtgcgaagtgtcggatgaagcgaaaggtggtacatcagatgagtggtgacatcctcgatgcatgagccgccacaaaaataaacgctcataagcgaacggatgatttcgctgtattgataaccatacagcctgcatctcataccgagggttgagtcgattacagatgagagtctggagtcaaattgctccattattgaaaatattcctccaaaaggagtgagtttctcggatttaattgctacctttgccatgtctgtcgggtttgatacatattttgatttgcaacactaagataggtgaaaaatctgacatggcaaattcctgagcaactttttgttgctcaggtacttaaaaagttatatttgtaatagtgttgcggaattaaggtttataaaacaattatcatgaaaaaaatcaaactattactcgtagccggcgcatgtgttgtgctgagtgcatgttcaccttaggctcctactgttcatacgaccgataaaggtacgcaatgggagtggaacgagggaactattgttgtaaaaagccccgaacgtcctgccggacaaaaaagcgtgatcggacttactgctcctaaaatggaggtggtgcgtgtaggctttgttggcttgggaatgcgtggtcccggagctgtatcgcgtttcacccatattcccggcacccaaatcgtggcgctttgtgattatgaccctaaacgtgcggaagcatgccagaacattttaaagaaagcttctatgccgaaagcggcaatctactcgggtgagacaggttacgaggaactttgtaaacgtgatgatattgatttggtatatatcgccgcagactggttgcaccacttccccattgccaaatgtgcattggagaacggcaagcacgtagccatcgaggtaccttctgccatgaacctgcaggaatgctgggatcttgtcaacttgagcgagacaacacgcaagcactgcttcattctggaaaactgctgctatgactggtttgagatgaatacgctgaacatggcgcagaacggtgtgttcggtgaggtaatccgcgcacaaggagcttacatccacaacctcagcgatttctgggattattactggaaaaacggtgaaaacgataaactgggctggcgtctggaattcaatatgcgtcatcgtggtgatgtgtatgctacacacggccttggccctgtggcacaagttttggatattcaccgtggcgaccgtatgaagacactgactgccatggataccaaatcagtagtaggaaaaggattggtagaagccaaaacaggttcagaatgcactaatttccgtaatggagatcacactacgactatgattcgtaccgaaaacggtaaagtgatcgaaatacaacacaatgtaatgactccgcaaccctataaccgtttgtatcaattgacaggtgtgaaagggttcgccaacaaatatcctacagaaggctacgcattgggagctgatcagctgagtgcttcaggagtacaacccaaggtggacaatctcagctcacacggattcctgccacaagctgaaatggatgctttggttgagaaataccagcaccctattctgaagaagtatggtgaaatagccaaagaggtaggcggacacgggggtatggactttatcatggacagccgtctggtatattgtttgcagaatggtctgcctctggatatggatgtgtatgaccttgccgagtggtgcgcactggccgaactgggtgagatatctatggacaataactgcgctgccgtagagttccccgacttcactcgtggagaatggaacgtggtgaaaggctacaagcacgcttatgcaagcccggaagaagagcaggcaagtatggaaaaagccaaagcattcaccgctaaactgaaagaacggggagccaaagagtgggcgacggaagctgacaaataatgtagcatttaagtgaagtgtatcgagtttatgttgttcttaagcatctgctccagactggaggacgggtggtgtggatgcttggaacaaggtgaaaggatatcatgacactttctaaaataattttataacattctatttaaaaatagtaacaaggataaggaaagggggagtgcagctggggctgcatttcctctttgctattattagaaagacgttgctttcaagcctttttcatgcttgtgttttgttttaagtctatgttaaaataatttaaacaaatctgattaatagattgggctatttcctttcactgtatctttaaacttcaatacgattaattcttaattctaactgaaaatgaaattattatctgttttatcattgagtctggtgttatcgtgcaccactctttctgctcagaaagtctatgaaatctctgctttcggtctgaaagccaatagcagtaaaaatgcctctccggttcttcaaaaagcgcttgccaagataaaggcggaatataaggaaggtgagaaggtaatcctccgttttcccgaagggcgttatgaatttcatgaaaaaggagccgctgtgcgcgagtattatatttccaatcacgaccaaacgaatcccaagaaagtaggtatcgcattagaggacatgaagaatctgacattagacgggcaaggttccgaatttgtatttcacggcaggatgttgcctgtttccttgttgcgttccgaaaactgtctgttaaagaacttcagcatcgatttcgagaacccccatattgcccaggtgaagatcgtagaaaacgatccgcaggatggaattgtttttgaaccggctccgtgggtcgattatcgcattgctaaagattccatattcgaggcttatggtgaaggatggaccatgagacactcgtggggaattgcttttgacggggataccaaacatctggtttacaataccagtgacataggttgtccgacgaaaggagccagtgaggtggctccgcgccgtatccatgctccggggtggaaagatgcccgcctagtgccggggacagtggtggccatgcgtggctggggacgtcctacacccggtatattcctttcccatgatgtcaatacaacgattgagaatgtgaaggtacattatgcggaaggcatgggattgttggcacagctttgtgaaaatattacacttgagaaatttggcgtatgtttgaaaggggatgccgatccgcgttattttaccacgcaggcagatgcgacccatttttccggttgtaagggtaagattgtgtcttgcaacgggttgtatgaggggatgatggatgatgccatcaatgtacatggcacttatttgaaagtggtgaaacgggtggacgaccgtaccttggtgggccgctatatgcatggtcagtcgtggggattcgagtggggatgcccgggtgatgaggtgcagtttatccgttcgaatacgatggaactggtcggaaaacagaataagatcatttctatccgtccttatgacaaagaacagaccgaaggcgcgcgagagttcctgattacgtttcaggaaccggtagaccaggtaattaatgaacaaagtggtttcggaatagagaacctcacatggactcctgaagttttgttttccggcaatgtgatccgtaataaccgtgcacgcggttctttgttcagtaccccgcgcaagactatcgtcgagaataacttgtttgaccatacttcgggggctgctattctgctttgcggcgattgcaacggttggtttgagaccggtgcctgccgtcatgtcattatccgtaagaaccgttttgtaaacgcgctgactaatctgttccagtttaccaatgcggttatctccatctatccggagattcccgacctgaagggacagcagcaatatttccacggcggacccgagggtggcattgtgattgaagacaatgagtttgaaaccttcgacgctcctattctttatgccaagtctgtcgatgggttggtcttccgcaataacaccattaagttgaatacggaatacaaaccgttccatcctaaccggaaccgcttctggctggaaagggtgacgaatgtgacgattgccgaataaatattttccccttgtttgcagagatgtagttacaggcggaagaaagtctgaatagtaagattagataaagttatcagctgtaagggtggaaatttcctcctttacagctgatttttttatcggtcttatcttattgttttttccctgtcagtttcatgaatcctagccttgttgtatagataaaatatttactaatttgatttagacaacaagaattatattgctatctttggcaggataaaactaatattgaatatgaaaaattgggttgtaaagctgttactgttacttttcattccttcttttgtgggaattttgttcaccgttatcctgggttttaatccgggtggttggttacaaattacgacgtatgctttacctccgttactcactctcgccggaggggcttttatcgttgcttcaagatggaaaattccttttcttatattgatggcagctgcaagtatggcctttaatattcctttacagaactggctttttcattcggcagatgaagtggtgcgttatcatgctgttaccgatttatataatttggagaataatgctctgtattttactttcgatactctggaggtggattatgcccgaaggagcagtgtgactgtcactcgtgaggtgacacgaagtatgggcagacaccgctatcgtaaggaacagaagcaatatcatttctctgtagctcctgcatttaccgattcattgccccatcataagtatgaggagcgggaagttaaggcatgggttattccggtgaggcatgagaaaggacaagccgttgtatgttatgagcgttgtatttttgatttagatgattatcagaaagccattgatcggtcccgctgtaaactccaccatcctcaagctccgattatacgacctttgtattcacagttcattacccggcaggaatggaaagggatctttttgaatgttgcatggattgtactttctgtactgatagtactgggggtaattctgaattatcaggcagacaggaggaaagcataatatcggaacagactgtatgaagggtactttatgaatattatgatcttcatgcatgaggcctgtcagtactattggtaaattctagaatgatgttttctttatataaaactttccccggacatttcatgacagaaacatccggggagaggtttttcattttttatttattgaaaagttttattttgcctctaccttcagattggataattctgtgtccttatggatggatggcagattattctgttttacaacaacagtatgaacttttccttttgccacttgcggcaaagtgaatttctgcttgtagataacctgttccgctgatgggcgcagcagatagcctgtttctttttcaaagcggttgtatattcttaccacaatttggttactgcctttttgaagcggtagcagcaccttttcctcgcggaacttgcagcggtaagggttgaggtgtttcattaccgacttgccgttcagatagatttcgataccgtttccggcacctacatctactagaatatcttgtgctttgggcgattctacctgctgcatcaggaagtaactttccagaatattgctggggaacatggctttttcctcattcacttctttccattgtccttttcttaccggtgctttgtccggatcagtatggatggtggcaggagcatcgaacaatccgctgcccggtccgcagaagtaacgctgaccccatacggtcttggaaggcaggtttaatgcctgtgccttgcctgcgtcaagggttactgtgtaaggtattccatctacttcaaccagtaattccttaccgttctcctgcggagtataggtaaattccaatgcgttgaggttggatttgttgatgctccattgatagctcaccgtactgcggtagttgctgtaataatcgaaacaggaataactataattgggagtgcgctgtgcagccataggttgcggtttcaccggttggtcgaacgtggcgcaaatcacttggatgtcttttccgtatgcgtcggcgggtagtgtgaagatcatctcctgtcctttctgaatagctttaatgtctgctttttgcagtttgcatcccggcacgttcaaagtgattttaccatcggcagggcggttgcctgataagatgaggtagaggttattgcctttgcgggtaatggttccccattcgaattgctcacggaaaggagaggcttctgtgccataaatggcttcaccgtttttcttcaaccagataccgatttctttcagcacctctctttcaaagggtactacggaaccgtcacctttgggaccgatgttcagcaggaagtttccgccatgggaaactacattgatcaggctgcgtagtttttccatcgctttggtgtgaacgtccccccttttctgccaggaacggtagctccaggtttcatcgaacatggaagctgctgtttgccatgcggtctgcaaggagccttcggggtatgtgttgtctgccatgacactgaagtcatactgatcgttgcccaaccggccgcttaccatacagtctggttgcaatctgtgcaccagttgatacagttccttgctttgttcaggagtgttggaacccatgtcaaaccaaagttcggagatgggaccgtagttggtcaacagttcggtaacttgggctttggtgaattcatgatgctgtggggtgatgaaatcacagttatggctggagataggataggcttgtggaaaatgccagtctatcagtgagaaatagatgccgaagttgattccgccacgtttgcaagcttccgccatctcttttatgaagtcgcgcttgccgggggtggcatcgtatgaattatagtcggtggtggctgtacggaacatacagaaaccgtcgtgatgcttggtggtaatgatgatggagcgcataccggcttctttggccagtgacacgatagcgtctgcatcaaacagggtgggattgaagcgcagggcggtatctccataccagtcactgaagattcccgcaaacgattggatttgttcactgtatcctcgggtgacggggttgccttcccatacgcctcccagttcggaataaagaccgaagtggatgaacatggaatacttgttctgatgccatttctcaaatgctttttccgagatttgggctgttgcacccaggcttatgacacaagccatgatgaaggttagtaattttttcatgattgtaattagtggttaactgaatgaatatattgcataatttctgtttgttggtcgggatggaaccacacgatgtctttgtcccgtttgaaccaggtcatctgtttacgagagtaaatgcgggaattttgcttgattttcccgatagcgaattccaatgtccattctccgtccagatacttgaacatttctttgtatcctacggtattgagcgagttcagatgccggaaaggatatacctgccgggcttcttccagcaagccgtcctgcatcatgatgtccacgcggcggttgatgcggtcatacaattcttcgcggtcgcgggttaatcctattttgatgatgcggaaagggcgttccttgtgagtacgggtacggaaagaagtataagtttttccggtcatgtagcatatttccaatgcatgtattactcgtttgggatttttcaaatccactattttgtaatattcggggtccagcagccttagttcggcgcacagagtgtccagcccttcctgttcgtaacgtcgtagcatcagctggcgtgtttcattgtctacagtggggatatcatctatgcctttgcaaatggcatctatatacatcatggaacctccggtcagtattacagtgtcatggttttggtataggatttccagttgtgccagtacgtctgcttcgtattgtgcggcgctgtaataatctgttagctgtaatgttccgacaaaataatgaggaacacgcgccagttgctcgggggtaggggcggcagttcctatcttcaggtctgcatacaattggcgtgagtctgccgaaacaatggaagtccggaagtgttcggcaatggaaaggcttagttcggtctttcctacaccggtagggccgataaggacgataagggtgtcaggcatggtgtttataaaaagagaggggcggacgtgtaacgtccgcccccgttaagattaatagttttcttgctcataagggtccggtgaggaggcaccgcccatatcaaatccttcgggatcaaagtcttccatatcgaagtcctggtcgccgtagaaattctcgtctatatccagatttccgctattgctttttgccatcatttcgtcaaagtcgacggtttgtttcggggcttctccggctttgcgcgaacacactgctttgtcaaggtctttgccggtgatgatttccgacagttcaatgaaaaacactcgttctgccaacgggtcgaatacatacagcaatttttgcttttcgtcttccaccaaatcactcaagcgggtttctctcatgatgtagctgtcttcttccgaactgcttcccatatcttccagtgtgatttcctggtctttctcccagtcgtcatcacaaatgaagaaagaggtcatctggtcatctttatatcctgccgctttcaatattgcttcgtgcaaatcaaagaaagttgcttccgagtctatctttatttctcttataaaatcatcgacttcatcagagattagtgtaaatctgtaaatcatatatttatactgtatatactatataacttttttttcgtgcagtaaagttataaaaaactttgttatctgatgatacctctttgagaattttctatgaaagaaataatatattctatttctttgctcataggtatttctttgcgtacttgttccaaggcatcggtaacgttcatgccattttgataaataatgcgataggtgttgtgtatattctctattagttcattagagaatccgcggcggcggagtcctacgatattgattcctgcgtaggcaatgggttcgcgccctgctataatataaggaggaatgtccttgctgaaacgtgaaccgccctgtaccattacataaccgcctacccggcagaattggtgcatcaatacggcgccgctgataatggcgttatcatcaatgataatttcacctgccatcttggtggcattgcctatgatgcaaccgctgcctatgatggcatcatgtgctacgtgtaccccttccatcaacaggttgttactgcccactatggttttgcctttagccgctgtaccacgattgatggttacattctcgcgaatggtgttgttatcacctatttcggcagtcgtttcttcaccgcggaatttcaaatcctggggaatagcgcctataacagctcccggaaaaatggtgttgccgttccctatgcgtgagccatacagtatattggcgttaggcatgattgtgttgttatcaccgataactacattcttgtcgataaacacaaaaggaccgatttctacattctcaccaatttttgcttcgggatgtatatatgctaatggactaatcatgttgtttttttagtggttatttattttttactatttgtgccataaactcggcttcgcagactactttctcgcctacaaacacatatcctttcattgtggagatgccccggcggataggagccaacaattcaacacggaacaataaagtgtctcccggcactactttctggcggaatttcacaccgtctattttcatgaagtaggtggagtatctttcgggttcgtccactgaattaagaacaagcagaccaccgcattgtgccatggcttctacttgaagcacacccggcatgacaggttcctgtggaaagtgtccctggaagaagggttcgttggcggttacgtttttcacaccgacaatgtgattggcgccaatggcaacgactttgtccactagctggaaaggataacggtgcggaagcagttcgcggatgcggttgacatccatgatgggagcttcgttgcagttataggacggagcctgtatttcgtgaagtttgatttctttgcgtatctggcgggcaaacttgttgttgatggtgtgccccggacgggtggcgatgatacgtcccttgatgggtttgcctatcagtgccaggtcgccgatgatatccaacagtttgtggcgggccggttcgttgtcccataccaagggaacatggttgatgtagcccagtttggtggcgtccatgtggggaacccccatgacgtctgccagcttgtcgtagttttcctggctcatctctttttcgtagattacgatggcgttgtccagatcgcctcccttaatcagtccggcacccagcaatggttctatttcgcggacgaatacaaaggtacgcgcggaagctacctcggtggggaatttagccatgtcttccagtgtggcgaactgattggacagtattttagactgataagagatcagtgcattcacactgaaattttcgtccggaagaacaatgatggaagatccggtttcctcgtccctgaattcgatttttgattttatgatatagtaatccttgacagcattctgttcttcgattcctacacgctgtatattttctacatacgctttagcactgccgtccagaatagggaattcgggaccgcttacctgaatcaggcagttgtctataccagctgcataaagagctgccaaagcatgttctactgtacttacttttattccgtttttcatcagcacagtgccgcgggtagtatcacctacgttttctgctacggcatcaattattggttgtccttcaagatcaattcgttggattttatacccgtggttgtccggtgcaggattgaatgtcaccgtcaagtttactccggtgtgaaggccttttccatttaaagaaaaactgccttttaatgtcttctgtttcaacatggggtttatttatttagttgtttttttaattcttctatttctttctgcatggcgttcagtgtggtgtaaatttcgggcagttttttgtatacggccgatgatttcatgaaattcttggcatcgatggccggagtgcctagaatttgctcgttggatttcacgttaccgggaacgcctgcttgtgcgccgatacctaccttgtcacctatcttaatatgtccggctagtcctacctgtccgccaaacatgcaccattcacctactttggtggaaccggcaatacccacctgtgatgccatgacagtgtggcttcctacttccacattgtgtgctatctggatcaggttatccagtttcactcctttatgtacaatggtggcacccatggtggcacgatctacgcaggtattagcaccaatctctacattatcttctatgatggcaatacctatttgtggaattttttcgtacccttcgggagaaggtgcgaatccgaatccatcagcaccgattacgcagcctgcatgcagggtacagtggtttcctaccaagcagtcgtgatagatggtggcatgtggataaagtgtacaattattacctactttggcatggcttcctacagtagcgtgcgggtggagggaagtgttgtcaccaatctcagcaccatcgcctacgcaggcaaacggagcgatatatacatccttccccaacttcgcagtgggggcaacgtatgccagcggatctataccagtctttttaggtttgctcatttcatagagggttagtagtttagccagactttcgtaggcgttgtctaccttgattaaggtagcttttacttcttgctcgggaacgaaatctttgtttaccaacacaatggtagactgagtatcgtaaatgtaatgagtatacttaggatttgaaagaaaagaaatcgctcccggcacgccttcctctattttagcaaaagtatgcacagttgcgttttcatcgccaacaataattccctggatgtattccgcaatttgtttagctgagaactccataatactgtctaattctttatgttctaaatgtttcagttttgttacttgcgtgttacatgttagtgtaaacacatcattaattatgcaaattacgcattttttttttatatatccgtacaattcgctaattatttaatgtccgtcgttttcggaacgcaggtaacatatataatattttttgacttttcgggagagaagagagatgttgagcatatccgaagccttggctatatcgcgggtgcttccatctttatagatgatttcaatactgtcatcctcctttttatacatattgttttctatactggatatggataggaagtattttgcttctttcttgttgatattcagtctcttacttattcttgaaagaatttcttcttttcgtgcttttgtgatggaagaggaggttacctctactttgaatagtttcctgttaatcattccacgactcagagtggacaataccacatcgctgtgattgctccaaactttcagtgcagtccatatgtcattatcatctaattgaataaaattttcaatacaatccggactgttataaaattcttttttatcaataggatggtataaaaagaatcttaaagcgggtgaggcgaacagctctacgccacgtaaggctaattcctttgctcgtgtcagagtgttgaccagcattttttcactggcaacggaggtcttgtgcagatatacctgccagtacatcaggcggcgggacatcaggaagttttcgatggagtaaatgcctttggattctactaccaggtgatcgtcttttacatcaagcattttgatgatgcgggcggacccgatattgccttcggatacaccggtatagaaactgtcacgccgcagatagtccaaacgatccatatccaattgaccgctgaccagttggtgcaggaatttcttgggatattcatctttgaatatctgtatggcaagattgagttgacctttcatgtccttgttcattcgttccatcagcatcaaggagatttcttcatgtgaaacgcctcctgccaatgtgttttccagcacatgggagaagggaccgtgtccgatgtcgtgtaacaggatggcagcttgtacggcttccgcttcgctgtcaaagatgaagttacctttggcggtaaggtgcttgatcgtttcgctcattaagtggaaagcgcctaatgagtgttggaaacgggtatgttgtgctcccggatatacggcagaggacaggcccagttgcttgatgcgggtaagacgttgcagcaatgggtgacatacaatgtcatatagtaaccccttcgggatgttgataaacccgaagacggggtcatttataatttttcggtcactcatggggaataattattcagtgtgctgatatgcttaaaccaatgtattacgctatgtatctacctggtaatttgcatattagcacattgttttattggcacattattttctccatctgtgcctggactttctgagcttcttgtcctgctacagtcgcaaaattctcagttttatccgcatagataatggcacggcttgaattaacaataagtccacaggtactattcatgccatatttgcagacttcctctagagaacctccttgtgcgccgattccaggtacaagcaggaagtggttgggaacaattttacggatgtcttcgaaagcgcgtccttgtgtggcacctactacgtacatcatgttttcatcgttggcccattcttgtgatttgcgcaatactttttcgaaaaggcgttcgccgttggtgtcctcggtcagctggaagtcgtgggaacccttgttgctggtaagcgctagcaggattacccatttgccttcgtaactcaggaagggagtcacgctgtcttcacccatgtaaggagctacggtgactgagtcaatgtccagctcttcaaagaatgtgcgggcatacatggccgaagtgtttccgatatcgccacgttttgcatcggcaatgatgaattggtcgggatagttttccttgatgtaggatacagtcttttcgaaagcgatccatccttttacgcccatgctttcataaaaggccagattgggtttataggcgatgcaataaggggcggtagcgtcaatgatggctttgttgaaagcgaagataggatcttcttcttttaacagatgttcggggatcttctttatgtcggtgtccagtcctacacagaggaatgattttttcttttggatattttcaaataattgttgcttgttcattgctatgtttacagtttatggtttacgatatttaaattataattcgctctctttcaaacgttcggcattctcggctacagtcaaatggtcaatgcagtcttgaatgtcgccatccataaaggcggccaaattgtaaatggtatagttgatgcggtggtcggtgatacgtccttgcggataattgtaggtacgtatttttgccgatcggtctccggtagataccattgtttttcgtttgctggcaatgtcgtcaatgtacttttggtgttctttatcatatataaaggtacgcaggcgagaaagggctcgttctttattcttcggctggtcacgggtttcggtacattctatcaggatttcctctactattccggtgttggggttcttccagttgtagcgcaggcgtactccggattccaccttatttacgttctgtccgccggcaccaccgcttcggaaagtgtcccatttgatttccccttcgttaatttccacatcaaaaggctcggcttcgggtaaaacggcgactgatgcggctgaagtatgtacacgtccttgggtttcggtggctggtacacgttgcacacgatgtacgcccgattcatatttcagagtgccatatactttatctccggttacggagcagataatttccttaaaacctcctgctgctccttcattggcgctggatacttccagtctccaaccttttgtctcgcagtatttggagtacatacggaacaagtcgcctgcaaaaatggcggcttcatcacctcccgtaccaccgcgtatctccagaatggcatttcggtcatcttgcggatccgcaggaacgagtaacagtttgatttcctcttccagttctgggatgcggacttcgcagagatttgcctcttcgcgtgccatctctttcatctccgggtcggattcgttagtcatgatttgtttggcctcttccagtccattcaggcattgtatatattctctacgggctttcatgatgtcattcaagtccttgtattccttggtgagcttgacataacgtttttggtcagctatgacattagggtctgtaatgagggtggaaacttcctcaaagcgagccactaacccgtctaatttctcaagtaatgtattattgttttctgccattcttttctaaacatttatttgcgacataccaagtgagtaatatccacccaagtatggcaagtacttttcttactgtatatagtatgtcatgccaagttgtttcatgaccccatgcggtagagatgaaatacaactcgcgtattgtatcaatcgtaactaatgagcatattattgctcctatgccataaaaaaatctttttttcaatgtagcaggtttggaagcgttattataatattgcttgtcagtatttgaattctccaaactcacttttgataattagctccttcttgtcactttcttctatacgtcccacgatcttcgcgtcaatattgaatgacttgctgatggcgatcacctcttcggcatgttcgggtgagaggtaaacttccaggcggtggcccatattaaatactttgtacatttcttcccaatcggtgccgctttgttccttgatggttttgaacagagggggaacggggaacaggttgtcctttactacacggcaattgtttcctacaaagtgcaggactttggtttgagcaccgcctgagcagtgaaccattccgtgaatttcaggtcggagcgcatccagtaatttcttcactaccggagcataggtacgggtaggtgagagtaccagctttcctgcatccagcggacttccttccacagcatcggtcagcttcaaattgccactgtacactagttcttcgggtactgccttgtcatagctttcgggatacttctcggccaggtattttgcgaacacgtcgtggcgggcgctggtgagtccgttgctgcccatgcctccgttgtattctttttcataggtagcctgtccgtaagatgccagacctatgatgacgtcacccgggcgaatattggcattgttaatgacatcggtacgtttcatgcggcatgttacggtagaatctacgatgatggtacgaaccaagtcacctacatcagcagtctcgcctccggtagcgtatacgcctacacccatttcgcgaagttcggccaacagttcatccgttccgttgatgatagcggaaatgacttcacccggaacgagtagcttattacggccgatagttgatgaaaccagaatattatctactgcacctacacacaacaagtcatcgatgttcataatcagtgcatcttgtgcaatgcctttccatacgcttaaatcgccggtttctttccaatacaaataagccagtgatgatttggtacctgcaccgtcagcgtgcataatgttgcaatattcaggatctccgcctagaatatcggggatgattttacaaaaagcttgcggaaaaatacctttgtcaatgttcttaatggcgttgtgcacatcttccttggatgctgacacaccgcgctgcatgtatcgttgattgctcatgagttatatattttattcaattgaatgtgcaaaaatagttattattttgcttatagccttgagttttatgaaaataaaagaggagaagggatttattctgttcccatattattgccgttcctgttttagatttattgttatgctcttattttttagacaagtaaatttaatatgtatatcgaacaggcattaatatcatacactatttatatgttacaatgccttgtcaatatagcgttataaagaaagacgcatagtacaaccaccccccatcaatatcaaagatcttaaagactataaaagaaaacacggcctaatttaacgtgaaatataaaattcccccgtcatctcatcgtcttcattatcagtatgttccggtgtgaaaatatctgtaaaggccccgaaacggttggtaatcgccggtcaatgtaccacattgcgcccaccatacccatagcggcaaaactccaacagatgtaccttgccggcagtatgttaccatgaaaacagccttatggctttattgcttcacctgtgtgaagcggcagtttcacacaggtgacaacggctcttcacccgaatgatagggcctgttcatctgggtgatggtacagatggtgcactcttcttgcacggatactgccgtaaatataccaagattacgtatccaatatgacaaccggcatctgacgagctggcttccgcaaggaaaaacgaaaaaaaacactttgtggggatacagaaaattctgtcactgcatatcgttgtatatcagtataatgcggtggcggaacaaaaacattgcagtgcggaaataaaaaataacagtacgtaaagttttatcagattataacttaatgacaaagatggatatgcccggcagacaaactttttgagagccgggcatctgcaacgacataatgtgtcatgccaaagaagcagtttgcattttattttagattttcatcagtttgatacaaccgattgaagaataaacttttagcgtagtatttgagaaacagaggtaacgatttagtaaccgtgcgaatatcagcgatttgcggtgctatgctgtcaaacaactctttgcatttataaagttaataaaattattcggggaataatgcctactatcaaaaaaactgcatcctatctttgtagatagtccatataaaaagaatgcaacctcacaaattatagctatctttgtgattgaaactcaatgcatcaattacaatggcaaaaattaccgttcaaaatacagatattagcgttgtcaaatacaatgaagaagactatatcagccttacagacatggcaagaagccaactgcaagatgagcatggaaacatttttgctaaaatgaatacttctgcctttatcgtagaagataaaattcatgcaatatatgaaaatgggaaattgtactttcaaagttatacaattgcaaatcaaatattttcgctaatagattttgttacagaagccacaaatacagaaattgaatcatttggcgaaataaaaggtatagatgtaaatgcagagaatataaaacatatcgcaaacataaaaactcgtcgactcataaaattattatctagcacaaacaacattgctacttttatgcgaaagacgtctcgaacgaaaacaagttttttaaagaaatatggaatcaatgcacaaattaatgggaacaatgagttagtgttaccgaccaataatgttgttgagccaaatcgtactttagaatttcttaatgaagatatatttagaggtttcatcactgatagcctttatcgttcaaattccaagaaaaaagacaatcgctaatcatgagtgagaataacaaaataatactctatcaagacgataatgagataatacgtgtgtctgttcgcttttccgatgaagatttgtggctgacacagaatcagttggcggaaatatattgtactacacaacagaatatcagccaacatgtagataacatctataaagacggagaattattcacagaagcaactaacaagaaattcttgttagttcgtcgggaaggcaatcgtcaggtgagacgtaacattgaccattacaatcttgacatggttatcgccttgggctatcgtgtgcaatctcaggttgcaacccgttttcgccgttgggcgactcaacggcttcatgaatatatccaaaagggatttgctatggatgatgagcggttgaagcaagggggtaatcgttacttccgtgagttgctgcaacgcatcagggatattcgtagtagtgaacgtaacttctatcaacaggttacggacatatatgccacagccacggactatgacccacgggacgagatgacaaagatgttttttgccaccgtgcaaaacaagctccattatgccgttcacgaaaatacggcagcggaagttatctacaatcgtgtggataatgagaagccgtttgtgggtatgacgaacttcaaaggcaactatgtgactaaggatgatgtgaagattgccaagaactatttgtcagaaatagaactccagcgtttgaatctgcttgtttccggtttcttggactttgccgagttccaggcattggaaatgaatcccatgaccatgaaagattggatagaggcactggataatcagattattgcccataaacgaaaggttttgattgataagggacgtatttcacataaacaggcgattgaaaaggcagaaaaggaattcgccatctatcgcaaacgcgaaatggatttgcttgaaagtgattttgataaagaaatcaaaagattaaaggacaagaatgataataatccaaactaatccactacctttgcatttgaagtcagcgttctttgggtttaacaaggcagaatacagaacttcgctcgtttctaaatcgttacctatcaagaagccaatctttgcaacccattcaatttgagcgataaagacaatgcacaatgtcttgccacgtggtaggtcaaacgaaccttgaaaccgcattgtatgcctatatctttgagtattttgttacaacttccgcgtccaccgtgatacaacacatcagaggcaggtttccgttgggtttggcactgcctttcttcacgtagaataacactttgaatgtacttcgctacgctttgcccaaatttactttttgctatgtgtttattttacgattgttccgacaaaggtttgtgctcctgcattattcaagatatatactgtatagaatccgccgggtaatgaggctatggacatttggggtgcataaacaaaatattttatttcttcaccggtagcagtaaatattttcactgtctttgcctcttttatttcaggcagggtgagaatatctccgtcatttagtaaaggcatgtccgtttctgaaattgcattcagttccaagggagcactttcgtttccaaaacggtcggcagctgttacggcaaaataacgtttttgtcgccaaggtgaaataggggtatattcgtattccgtatgggtgagataggtttccagtaagtttccggcatctgtgatatctaccggataggtatccgaggcataaagatgataggtgacaagacctccgttgttatctgtggaaatctgccagctcatgtgcattttgccgtccggcaacagttgcagggaaggcatggccggagtggatggggggatgctgtccatccaggtcattgggggaatcaatgccggagtggtatagaaattctcttggagttcgtcccaaatgcctttggtgttgttcaatagaaaacgattgcggaagtaggcttgtccgtttagttttatctgacgggtgaaatgaagttggcggactatttcgtccaacggccaattttgttcgtcgggagagaggaaataaatgcccaaacctggtactatccagcggttaccgcaattctctttccaatccaatgcaaaaggatagaaattatttccctgaaaatacatcatcgggaacaacgcatcatgaataccttcttttagccatttctgagcatcttggtaaactacatgataagcgttccatccacgggagggatatcggttggtatctcggtatttgccaataggggaactgctgactttcacccagggtttgatagtcttgatgtcggtatagagcctatgcacaatatctgtgatattatcacgccgccattgtttcaactccttacctttgccgtatttccggtaggtgtccttgtcgggaaagttgtcggcttgctcagggtagcggatgtaatcgaaatgaatgccgtctatatcataacgggaagttatttcttttacgatgcatgacagatattctttggttcccggatttcccgggtccaagtaccagttacctttataaagtttgcaaatagtccggtttttccgtactacggagctacgtccttgcaattgtacttgacgggtgtttccggcaggaatcgtaacaatccatgcatgtagttccatgccgcgtttgtggcattctccgatggcgaaagccaaagggtcatatccgggattccctcctgtgctaccagtcagtgattcggcgaaagtttctatggcggaaggataaatcatatctccgcgcagacgggtttgcaacaataccgtattgaaattggcggctttcaggcgatccagtatatcacataattctttttgctgacgccggatgcctgatgcgtttactgccttgttacgaggccagtccattcctccgagcgtagtgatccaggtggcacggatttcatatttaggttgtgagaaaacgggtgataaactcactatgactagtaataaagttataaagaatgttcgcatttactttaattttagggcaaagatacgaagtaatcaattaattcgttacttttgccccaacaaaacaaaaaatagaatatgataacctttattattgcattattggttcttgtaggcggatactttttgtatggaagttatgtggaacgtgtgttcggtcctgacaagataaggaagacacctgccctgaccatggcggatggtgttgactttattccacttcctacttggaagattttcatgattcaatttttgaatatagccggcttaggacctattttcggtgctataatgggagcgaagtttggtacggcgtcttatttgtggattgttttaggtaccatttttgccggggcggtacacgattatttgtccggaatgctttccattcggcatgatggcgagagtttgccggaaattatcggtcgttacttgggccttcccacaaagcagttgatgcgcggttttacggttgtgctgatgatattagtcggagcggtttttgtggcaggacctgccggattgcttgccaaacttactccggagtatatggatgttactttttggattatagtcgtatttgtctattatatgttggctacattgttgccggtagataagattataggaaaaatatatccgttgtttgccattgctttattgtttatggcggtggggattttggtgatgttgttatggaatcatccggcattgcccgaaattacggacgggctgcataatacccaccctgccggattaccaatttttcctatcatgtttgtttctattgcttgtggggcaatcagtggctttcatgccacacaatctccgttgatggcacgttgtatgaagaatgagaagtatggccgtcctattttttatggagcgatggtgaccgaagggatcgtggcattgatttgggctgctgccgctacttgtttttttcatcaaaatggtatggaggagagtaatgcttcgattattgtggacagcataaccaaggaatggttgggtacgataggaggtttattggctgtattgggggtaattgccgctcctattaccagtggagataccgctttacgttcagctcgtttgattgttgccgattttatgcatttggaacaaaaaagtatagcgaaacgtttattgatttgtattcctatttttgcggtaactatcggtatattgttgtacagtcagcgtgatgcggcaggatttgatatgatatggcgttattttgcctggtgtaatcaggctttgtctgtgtttactttgtgggcggtcactgtttttctggtacgtgcgaaaaagaattattatattaccttgtttcctgccttgtttatgacggctgtatgttctacttatatttgcattgctcccgaaggattggcactttctgattatgtatcttatataatcggtggtctttgcacgttggtagccgctatagggtttgtaagttggtataggaaacaaaacagcatagtttatgaaaaaatatagaaaatcgatttggttgcctgtcgctttgttggtttatactacagcgatggccgtttattttattccgcgtaatacggaaataagtgatacggaaaagtatctcacagtaggtttatcctatatgataatagcgttgttatggattgtccttcgtaagaaagaaaaggcggaggaaagacgtgaacgtgatttggaaaataaaaaataactattaaacgacaacattatgaagaaaattttagtcagcttgatgctgttggtaatgactgcactgagtgcacatgctcaatttgagaaggaggtatggtatgtgaatgcttcattgacagggcttgacctatctcatagcaagaatgagggtacaaattttggtttcgctttgaccggtggtgcgtttgtagccgataatgtggctgtattgctgaattttaagggcaattatgtagaacatggaatggatgaaaccagtattggtgcacaaggacgttattatttttccagttgcggtatttatggaggattgggaatggcgtataagcacctttcttgtgtaggatttaaaaagaatctggtttgtttgacaccggaagtcggatatgcttttttcttgggcagaaatgtgactattgagccgtctgtatattatgacttgagttttagtgatatttcagaatttagtaaattaggcttcaagatagggttcggagtttacttctgattgatgtaattccaccacagattacgcagattattgaatgggagaattcattgaaattcaatctatgtaaatctgtataatctgtggtggaaaaactttttatgtgagattaatgcgcatagagatgcgtgaacggaatttctttaccatcactacctgttacttttaatttcagttgtcctccgttttggtcgaaataacgtaattccattggatgatatcctttcgccaatgccttttgtcccactatttctttaggtccgtgaggtccgtcattgtctactatctgttcactgtctatggtcaatgtactaccatcgtcggacaggagtgcaaaagtgtagatatcgtcttgaggagcattgaaatatcctttgataatcagtccgatatttccttttacttttttaggaatcataacgtcttccactggataagtaccattgaccggagctttttctatttcactgcatttatttcctttaaattcgtgccatgtagctttcaaacccggattggaaggagcggcagttacagagggggtatattcacttttgatgaaacgtgtcttggctatgtcacctttctttccattagggcggaaggtgcagaaagtaaagtctgtggtttcagtcactttgatgggaccttcatatacgggagattgtaaagtaggagtactgccatcagtggtatagtgaatttccgcagtggggtcaaggcaagttacattgatggttccttcaccgataaaggcgttgacggcattaaagccttccaaatcgggtatacggtaattgatacccatgatattgagacgttcaaactgatcagacaggcgttgtttgaaggcattccagtctttttgctccggtttgctccaacctaattcggcaatagccagcaaacgtggaatggccatatattgcatacgtgcgttggaaggaatccattcgcaccaaatatttccctgcactcctaaaatcagcgactgctgctcgggagtcaggttgtctgtcgtatccagattataaatgcttgccatagaattcttgtcttctgcataatccaaataaaattgtccgttaggagtgaaaatgacagggttgccttgtgccgttgccttggtcgctgcatcttttacccagctgcgccaccacattacggtggctgttttagacaatccgccttcaatgatttcatcccagcctatcatttctttgcctttcccgttaaagaatctctccatgtcatgaatgaaccatgattgcagttcttcttcggttttcagattattgtcatgcatacgtttctggcagtccggacattttttccaattggttttttctacttcgtcacctcctatatgtacatacttataggggaaaagggctatcagttctgcataaacattcttgcagaactccaatgcagagtctttccccggacaaacaggtgaggagaagacgcttccccaaccggtttcgttaaaacaggaaacaccttcatagttactcacagctgccagcatgtgtcccggcatatcaatttcgggaataatatctatgcctcgtattttggcgtatgctatgacatccttgatatcttcctgagtgtagtagcctccatatagggtgtcaccttctacgatgcgtatcttgtcttcgggaattgccatatccggattgttatcagtctttgactgacgtatgcattcgcggtcatgggaattgaatttgcgccaggctcctttttccgtcagtaaaggatatttcttgatttcgatacgccatccttggtcatcggtaagatgccagtggaatttattcatcttgtaaagggccatgacatccagtaattctttcacctcatctattgtgtagaaatggcgggatacgtccagcatgatgcctctccattcaaagcggggggcatcttgaatgttaacggccggtatggcccagtctgtacctttaacaatttctttagattctatttgcgggggaaacagctgtctgagggattcgatacctgcaatgacacctccgtaagagttacctgtaatgttgaccttatcgctctcggctgtcagggtataggcaccttcttttccttgaacatcccccaaggcaagggtgatggttccttcgccttcttttactttaaggtcgtagcctgtggcactggaaagcatatcggccaaatactcggctgcgggaattagttcggcgtcaataacaccgatggaggtattacttttcaatacaaaagcaccgtttgtttcctccagatggttggttatgggtacaatggatacctcttttgttacagggggagtactggtacatgctcccaacatcaatgtgcctgctaacatacaggcggtcattaactgcttatgtgtacatttggtcataggataataaattaggttattggacaaagataacagaaatattgggaaaaacgatattatttggcgggatattggaaagtaaccagtactcctttatggtctgtaggccatacgcccaatggttctataaacttgtctttagatgtttcctgaacacgctgtgcacggactatggaatttttcggaccgaaaatggcggcgtctttcactttcaaccccttttcgggataataccaaatgtaatctatacggtcgcgttcatctgctttgggagcccaggttattttgtcggcgggctttgccggattatccgaaggataagtgaagccgggatagtttaatacatctggatagaattctcgataggcgtctttcaatccggcttcgtctaacaggacaggaactgtccaggggattacaaagccatgatggtcatacaggtctttggtctcttcagtccaatcttgatgtgacggttcattaaaatctcctcctaaaatgatggtgtagccggctgcacgatctttttttgcctgttcaatgaatagtctgatggcgtcatcgcgttgtgaggctacatttctctttaatacttcttctacggtagtggggatagggatttcttcccaagtagagccatcatatccgcgtacattataataggcgtcatccaaataatcaagatgagcggtgtagactgctattttctgtccgtttatatcggctgtaaggcgatagatactgccgtggtcattcttttcgggaaaaacggttaatgaatcagtgatggggtatcggcttaacagacctgtatcataggtatagaaggagtaataggtttctcctttttcctttaatgattgcactaggcgggcagtgaaattggtgttttcgtaattacgtacttcgctcaatgtgacgaagtccggacgaagacgggctatttcattcacaatagcgtcgtaaccaccgggaattacagttccttcttgccaaatgttccattgaagaacggtgaattctttctctttttgtgaacatcccaataggaaagggaacagcaagagtagtaaaaaaagttttttcatattctgttgatttataaggttgttaattcaattctaaatttactcatattttcgtttagattgacaatgcggaaaacattaaaacagatttttagtaaaatgattctgcaatcataccacaaaatgctaaacttatagaacggaataaatcacttttaaattcccatttatcatctagtggtatattgcgtataatcatatttaataatttgtgtcagtttggacaatcaacggtgaataaaaaatcaatcaggagaatccatcgccagtttttcacgtaaaaactgtcccgtataagatgccgcacatgctgcaacctcttccggagtgcccgcaactaccagatttcctcccatatttcctccttcgggtcctaggtcaatcacatggtcggcacattttatcacatccatattatgctcgataatgataatggtatgtccgcggctgattaaggcttcaaatgcttccagcagtttcttgatatcatgaaaatgcagacctgtggttggttcatcgaatacaaaaatagtgggttgtgctttctctatgctcagaaaataagctagttttacgcgttggttctcgccgccggaaagagtggaggaggcttgtcctaactttatatatcccaatcccacttcttgtaatggaattagtttcttcactatctttttttgattgtattcggcaaagaattcaatggcttgattcactgtcatttccagaatgtcatagatgctcttgtcttggaattttatttccagcgtgtcgctcttgaaacgttttccatgacaagactcacattctagtaccaaatctgccataaattgcatttcaacggttaccgtaccgtcacctttgcattcctcacagcgcccgccttcggtattgaatgagaaatatccggcagtatatcccatttgcttggcaagaggctgttcggcaaagagttttcgtatttcgtcgtatgcttttacataggttaccggattgctgcgtgatgattttccgataggattctggtctacaaattcaatatctttcaccagctgtacatctccttccaaagagatgaactcacccggccgttcgctagcttcactatattcgcgtttcaatgccttgtaaaagacatcacgtaccaacgtactcttccccgaaccgctgactcccgtaactaccgtcattacattcagtggaaattttacgtcaatgcctttaaggttgttttcacgcgcaccttttatttctatataattgttccacggacgatggcatcggggaatctctatgttttcttctcccaacaaatagcgcaccgtataactgttactgtttctttgaagatcgttcatgttgccttgatatactatttgtcctcctaaacgtcctgcttgaggaccgatatcaatgatataatcggcagcacggattatttcttcatcatgttctaccactactacggtgtttcccagctcctgtaactgacgaagtacttttatcagccggtcggtgtcacggctgtgtaatccgatactgggctcgtccaggatatagagtgaacctaccaagctgctgcctaatgaggtggccagattgatgcgctggctttcaccgccggagagcgagttgctgagacggttcagtgtaagatatcccaaacccacatccatgaggaagttgatgcggttggtaatttccgttaagatccgtttggcgatggctgtgtcatgtgcatctagttctagagtgcggaagaattcttttaagtcgtgaataggtaagtcaaccagttgagagatggattttccacctacttttacataaccggcttcttttttcaagcgtgttccgtggcagacaggacaaatagtttttcccctgtatcgtgccagcatcacacgatattgtattttatattggttttcttccagcattttgaagaaagaatctatacaggccttatttctaggtccatgccataaataatctttttgttcctgtgtcagttcataataaggggcgaagatggggaaatcgtgggcgggagcttcatgaatgaattcctgtagccattcccccatcttttcaccacgccagcaaaggacagctccgtcatatacactcagagcacggtttggaatcaccagatgttcatctatacctatcactttaccgaagccttcgcattcgggacaagcgccgagaggggaattgaatgaaaacatttggtcattcggttcttcgaatttaattccgtcggcctcgaatttagtgctgaaagagaacagctgcgtacttccgtcagcagagtagaagcggaggaggcaattcccgtctccctcgtacatggccgtttcggcagaatcggtgaggcggctgatactgtctttgctatcatcggctgtcatgcgatctaccagcagatagatgttttgttttttatcttcggcagctgtttgttgcagaaaatcttctatacggactatttcacggttcacctctatacgggtaaatccttgtttcaagtccatttccagttgctggagcagtgtacggccttcacggggcatcataggagtgagaaccgtgtatttcgttcctttaggaaaggaaagcatacagtttacaatatcttcaatgctatgttttttcaccagttgcccgctaatgggggaataagtcttccccatgcgtgcatagagcagtcgcagatactcatatatttcggtggaagtacccacggtggaacgaggattgcggctgttcactttttgctctatggcgatagcgggtggtatacctttgatgaaatcacactcaggcttgctcatgcggcccagaaattgacgggcgtatgatgacaggctttctacatagcgtcgctgaccttcagcgtataatgtatcaaaagccaaggatgattttccggaaccggatagtcccgtgatgacgaccagcttgttgcgtggaatgtttacatcgatgtttttgaggttgtttacctttgctccttttatggatatatagttactttctgacattctttattgaatttggtttaatatgcaaagataattataagttttcttatctttgcaagcgtattaaacaagaataacaaaatgagagcaaaaactattcttcttttattgatagcactactttttacttctgtcgtcagtgctcagacacgttatcctaaacgtgagttccgcggtgcatggattcagtgtgtgaatggacagttccagggaatgccgacagagaagatacagcggctgttaataaatcaactaaacagtctgcagggcgcaggcattaatgcgataatttttcaggtacgtgcagaagccgatgccttgtataaatcttcttatgagccgtggagccgctttcttacaggagtgcagggcagagtgccttcaccttactgggacccgatgcagttcatgattgatgaatgccataagcgtggaatggagttccatgcctggattaacccttaccgtgccaagacaaagggaactactgccttatcacccattcatccgtataataagaatccggaacgtttcgtgaattatgctggtcaactttattttgatccggctttgcccgaaaaccgtaaatacatttgcaagattgtgcgcgatattgttacccgttatgatgtggatgccattcatatggatgattatttctatccttatcccaacccgggcgaagattttcctgatcatgtcagttttgcgcaatatggtcgcggatacagtaataaagccgattggcgccgtgacaacgtgaatgtgctgataaaggaaattcacgaaactgtgcgcgagtgtaagccgtgggtgaagttcggtgtttctccttttggtatctaccgcaacaagaaaaatgatccgaatggaagtgatacacgcggtcttcagaattatgatgatttgtatgcagatgtgctgatgtggattaataatggttgggtagattataatatccctcagatttattgggaaataggtcatcctgctgccgattatgacaacttgatacattggtgggcaaaacatgccgcttcgcgtccgttatttatcggtcaggatgtgatgcgtacggtgaacaaggcggatgcccgtaatccgttacaaaaccagatgcctgccaaaatgaagttgcaacggtcgcttcctaccgtgcagggaagttgtcaatggtatgctgctgcagtggtggataatgccggcaattaccgcactatgctggagaaggagtatcatcgttatccggctttgattcctgaatctccttttatggacgataaggctccaggtaaagtaaagaaggtgaagatggtatggacgtatgaaggtccggtactcttctggacagctccgaaggcaaaggacgagatggacaaagctgtacaatatgtggtttatcgctttgataaaaaagaaaaagtcaatttggatgatgcttcccatattgtagccattacccgtgaccatttttatccattaccttataacgatggaaaaacgaagtaccagtatgtagtgacagcgttggatcgtttgcacaatgagtcgaagggtactaaaaagaaagtaaaactgtaagaagcgggagtgtttctttaattttagattttatttttactgccactgcctgggtattatattcacgtcctatcgatgaataaagaattccggggcagtggcagttgatttgtatgccgcctgttttccgggtgctatattgtttatgttgaaatcaggaaaaggttataacatctgtaatccatctattgcggctttatctaatcagtgatgacaaagagttgatgattatttccggagccgatcatacggatttttttgatgatttcccataatcgtcctattctcagtaaagcaggaaccctgccactccgcaaagtataatcattaatataggattgattttgtatttccgtgtacctataaaggttactagaaaaataattatactgatgatgaattgatacaaatctatttgataactgccgaagttttcagcattcatcaagacgagtgcagctgctgccagcagacctactactgccggacgcaaccctttgaatacggcttctacaaccggatgcttttggtatttcaagaagaaccggctgatgattaccattaatatgaacgatggaaaaactacagcaaaagtagctatgcaagaaccgaatatagcccagctttcattgtagcctgcattcaataccgcagtatatcccacataagtagcagagttgatgccaatgggacccggtgtcatttggctgatagcgatgatatctgtaaattcgctggcactgatccaattatatcttgttactacttctccttgtatcatggacaacatggcatagcctcctccgaaaccgaagagccctattttacagaatgtgtagaataaatatagaaaaatcatttggatgaatatttatgtttgtacttgccatatataaaacctcccacgcccgctattatgataatgtagactggagacacgtccaatacccagataagcaatgcggatactattggtatccagacagtgtaacggtttatcttggcggattttgccatggagaaagtgggagctgcaataagggctactaccgccgggcgaattcccttgaatatattctctacaattgggtattgtttgaactgttgaaagaacaaggcaattgccaatatgataaagaaagaggggagtattgtgcctaaagccattgccaatgctccacggaatttacgcaatttatatccgataaatatggcaatatttacagcaaatattccgggtacagactgagtgagggctaataaatcaataaaatcctctttgtcaatccattttcgtttgtccactatttcatcttgaattaggggaaccatagcatatcctccgccaatagtaaatagtcctatttttaggaagataagaaatgattgtaaatagaaattcatttttttaattttgtttcatataagtgcttggtggaactccgtagtatttcttaaatgtatccgtaaaatatttgggatcactgaatcccatcatatccgaaacttcggatacggtataacgtttgcttttcaataaaatgctagcttcgttcatacgtactttacgtataaagtcactgggcgaatcattggttaaggcctttattttattgtataaactactccggctcatattcattgcatcacataggttttctacgttcatttctttgtttatactactttttatgatgtcggtagcttttaaaagaaattcctgttccaaactgaccgtcggatcatctgatacctcgtctgcattgaatttgaattgtgagaaacgctttttcatgatttccctgttcgccagaacgttggttatgtttgctttcagtacttccatgtcaaatggtttgactatgtatttatcggctttggtctgtaagcctttgataatactttctttatcgttcaatgcggtcagcaatatgataggtatatgactggtttcaatattacttttcaatatattgcacattttgtttccattcatgataggcatcattacatccgacagtatcagatcaggttgtcgctctttgataaaatccagtgcttcttgcccgtttcctacatcagacacatgataatcttccgatagtgtatgcaataggaaagtacgcaattccatattatcttccactatcagaatggaagcggcatgtgttttgaccggcttgtttttgatctctttcaccagttcttccggattgccttcgatgacaggcagcgggtcaattacatcagcttttttgaatatacggtagttgtatttccgacttttgatagggaatgccagtttgaaggtagttcctacattctctatactgctcattgatattttgccggcatggctttttatcagtttgtaggtaagcagcatgccgatgccgcttcctgtgatttgcagattgatggcattattccctctgaataggcttttgaacattttcttttgttcattggcggggatcccgattcctgtatctgtaatagtgatgaaccaatgacttttatttttctgagtttgcacagtgacattgcccccctgacaggtatatttcaaggcatttgtcatcaggttacggataatggaatccatcttgtttctgtccagccatacttcctggctttcgaaattagtttcaaatatgatatttatctgtcttttgcgggcatataaattgaactgttccaaatagtttttgatatagttgttcaattcgtatcgggatacatatacagtggaggtatacagttcctctttttcaaaattaatcagattactggctaactcagacagattgtctgtattttgtatagctaggttgatattgattcttccctgttcggacaggttttcgtttttaagaatctctcccaaaggagcttttatcaaagtcagcggtgtacgtatatcatgcgccgtgttgataaagaaccggattttttcttttgaattgtttctgtctttcctaagccacaaataacgtaagacaattactccgaccagtataaaaatgatcagataaagaatgcctgcccaaaaagtagcccaccaaggtggggttacggttatgaaaagtgaacgttcttctaacaaatggtgatcatccatcaggatggctctcactcttaatttatacttaccgggaccgatattagtgtaacgtatgcggttattgttcgtgagtgaagtccattcatcataaaacccttccagtttccaggaatagacgatgttggagggattatcataattgatggaagacacatccaatgaaaaaatattctggtcgtaattcagtatgatatgccgggtatcatcaatttctttttttaaaggggaacctttttcaccgggcattactttctgatagagcagtcggaaattatcaaataccattttggatttgaattgatgaggcagcgtgacggtatctgccagttcaatggctccgtctccacatccgaaaataaattttttatcgcgtgtatgtactccggcagcttgattaaagctggtagacatcaacccttgttcttttgtccagttagagaatattttttcttttgttttgaaacgggtcaaccctttttctgtactaatgatcaaatcgtcttccaaagtagacagtatgcaatgaatattattagatatcagagctgaattattgacatggtaattagttactttttctgtataattgttgtaaatccatataccggaaccatgtgtaccaatgaaagtgatgttctttttactttgataaatagtatttatgcagcctagttcggagtctagattcaccgctttgagctcttgattgaccttattgaactgatacaatccattgatagttcctatccataaattgtgggcgtccttattggtgatataggtgatagggaaatccattttataacaatgcatttcctttgtatccatatcataactttttaaattgtaatatcctccggcccaaatcagattatcccaatccttataaatacaacgaatatatttatccggttttatggtgtcatcatttaatgtctggggaataaaatattgtgtggtcatgtttttcttatctattttgtacattcccgacatatatcctcctactaaaataattcctggccgggattcacatatagagataaatacatgattttgattaggtgtgtcatgctgataagttgataataaattcgtccattgtttggtggaaggacggtagcaacatacgccattattggtcgcataccaaatatctccttcagaatcttccaatatatagttcacttggttatctatcagtgagttgggattgtcgtaagagtgctgtatccatttatatccgggatatttctcggaatatacagtaattcctataggatagactgccatccataatttttgatcatcatcaatatagatatcattaatgatattaccgttcattttattggaatggttgtggtcggcatttagaaaatttgtcaattcgtaagtgcccaagtttaatttatatacgcctgcgccattagttgctattagcacctcgttttcattttctttacttgctatgatagagttgacattaatgtcttgtagtccgttgtgtacatcaatcagttggcggctatggatattgtatagataaataccatccagcaaggtacctattactagcatttgggtttccggatgaaaatagatgtagttcactatatgaaaattatccagttccggatgcttgattgtttctaatcggccatgattcagttttgcacagtaaatcttgtggctggatgccagaaaatattggttgttcgtagattttgcaatatatgtgatttcttccttgataggactttccagttgaataagttcatgggtatctatgtcgaaaagatattgtttgtttttagtgcaaagcaatatattgttgtctttggagtcaagaaatgaagcggtgagcggcagtccgctgttgcttttgtccttactggcaaaatcgcaaactagttcaaatttatcttgtaaggaattgtacctgaatagatgaccggtttttcctatctcccaaaccactcctgccgtatctgtttgcaaagtgttcaagttaggaaaaaagttcaatagttttccgttggctgttaagctatagtgtgtgtattgttttccgttgtacctgtctattccttcgtgagtgagaaaccacatatagccctttttatcttttcgtatagataaaactctacggctgctcaaaccattctgagtatccagatactggtatagttgagcaacggcaggtgttaccaaaataacaaaaaggcatataagtaaaagaattcttctcatattattaggaggcaaaatccttacaaagttcgtaatttcccttaacatatcaaaatctgttatatacaaaaaaagcggtaatcagtatgactcaccgcttttttagtaaatataacaaatcgtttttattttttgttcatctcaatccattttctagcattgacaaatgcttccatccatggagtaatctgatcgttctttattctatcagccggataataagcattttgccatgggaaacaagagcgttccagatgaggcatcatggccaaatggcgaccgtcaggactggccagaccggctacgctgtaatctgaaccgttcggattgccgggatactcatcgtatgagtatttcaatacaacattgtatttatcttcatgatatggcaatgagaatttaccttctccatgggctacccagatgccaagcttgcttccgcttaacgaaccgaacatgacgcttctattcataggaacagtaacacctacaaacttggattcgaatttatgtgaatcattgtgcagcattttcgctttcttggtgaagtctgggttaatcaggtttaattctatcatcagctggcagccgttacatacgcccaatgacaatgtatctttgcgtgcatagaagttatccaatgcagctttggctttgggattgaacaagaaagctccggcccatcctttggcagaacctaaaacgtccgaattagagaacccaccgcagaatacgatgaaattgatgtcctctaatgtctcacgtccgctgaccagatcggtcattgttacatccttcacatcaaatcctgccaaatagagcatgtaggccatttcgcgttcgccattggttcctttttcacggataatagccgctttgatacctgtcggagtacgacggtcggggttaaggtcgaattgtgaaagtttgccggtgaatgatttgtcgaatacaaattccaaaggttgtttcttgtagttctcgaaacgttttttggcgcagccgttcatgctctgcttgcggtctagcaagtaagaggtagaataccatacatcgcgcagatagtctatgccgaactggtaagtcgcatctcccttttctaccaggatatgccgttcttcagtcggtttacctaattttacgtagcctatgcctgcgtcttccaagatctttttcacttcttctttgtgcttatcttttacctggataacaatacccggattttcggcgaacaatatcttgataatgtcatcttccttaatcttgttcaggctgatttccataccaccttccatattcgagaagcacatttcaagcagtgtagtaataagaccaccggcagaaatatcgtgaccggccataatcagacctttatttactaattcttgtacagccaggaatgcgtcgcggaaatattcaggattttgtacagtcggtacatcgtcacctactttgttcagtgattgtgcaaaagcagaacctcccagacgtaacttgtcaaaactgaaatcaatatggtagatagtgctcttttcatcatttaccaatacaggagaaaccactttcttcacatccgaaacttcaccgccggcagaaacgatgacagttcccggactgatgatcttttcaccgttaggatatttctgagtcatagacaaagaatcttttccggtcggtacattgatttgcaatgagcagcagaaatcggaaagggcttttacggcagtgtacaggcgggcgtcttcaccttcctgtgcgcggcatggccacatccagttggcagacaaggaaatgctgtccaatccttccgccatcggagcccatacgatattagtcagtgcttcggctaccgacaaaacagagcctgcggccggattggctaaggcggcttggggagcatggcctagagaagttgctatacctttttcgccacgatagtcgagagctactacaccacaatcgctcagaggcaactgaatttcaccttgacattgttggcgagcgattttaccggttacggaacggtctactttattggttaaccaatctttgcaagcaacagcttccagctgaagtacgcggcggatatattcatttaatttggaagtttcgtatgaaacattttcataatggcgctctacggtcttgtcaaccatgtaggttttcggagaagaaccgaacatctgatctactgccagatcgaacggacgtaccccatcggtctgttcaaaggcaaagcgggcgtctccggttgtttcacctacggtatacatcggcgcacgttcgcgatcagcaattttttgtacatgttcaatagccgactcgtcaatcagcaatcccatacgttcctgagattcgttggcgataatttctttggcagacaaagtctggtcaccgataggtagtttgtccatatgaattaatccaccgttttcttctaccagttcggataaacaattcacgtggccggccgaaccgtggtcgtgaatggaaacaatcgggttgttatcttcttcacacaatgcacggactacattataggcacgtttttgcatttccgcattggcacgttgaacggcgtttagttcgattcccgatgagtaccggcctgtctcaacagaagagaccgaacctccacccaagccgatgcgatagttatcaccacccattacaacgactttatttcctttttcgggatgtcctttcagacagtcgcgctgagtaccgtaacctactcctcctgccagcataatcactttgtcgtatgcatacttctcgccgttttcctggtgctcgaatgtcagtacagaaccacaaatcagcggttgaccgaatttgttaccgaaatcggaagcaccgttggaagccttgattaagatctgttccggagtctggtataaccattggcggacaggaaggatgtcttcccattcgcgtccctcatcagtacggggataagaggtcatataaacggcagtaccagcaatgggccatgagcccttgccaccgcccatacggtcacggatctcaccaccggtaccggtagatgcaccgttgaatggttctacggttgtcgggaagttatgtgtttcggctttcagtgagataacagtcttgatatctttgataatgaaataatcggaagtggaatgatcggccggagagaattgctctactatcggtccttcggcaaatgctacattatctttataagcggaaataatcttgttgggattttcagcagtcgttttcttgatcatctggaacaaggaagactccatttcctgaccatcaataatgaatgttccgccgaatatcttatggcggcaatgctcggaattgatctgtgcgaagccgaatacttcggaatcggttaatttacgtcccaaatctttttcaaccttcagcaaatagtccatttcctcacgggaaagtgccagaccttctttttcattgtattcttcgaggttctcgatgtgaacaatcggctggggtttgatgttgactgtgaaaatctcctggttcaatcccttatacatacgttgcagcataggatcgtactcggcgttttcgtcttttacagggaaatattcctcaatgcgtaagacacctgtaagacccatgttctgagtgatttctacagcatttgtactccagggagtaatcatttcccgacgcggtccgatgaagcaacctttcaggttctcttcgttctctacagtggcttcaccataaagccagcttaatttctgaatatcctcagaagccagttcctggctgacttctgttgctattacacttttagtgggtgttctgaaaaatagaatcatagcacttttatagttgttttgttaattgaaaactagttctaatatcaagggtctattaataaggtgcaaagttatataaaagagacggggtatgaaagaattttgagcgtaaatataggtactttcgtaaaaaagtagcatctttgcagcatgaattggatagaacaagtaaccatactcgatttattggtgaaagggcttatcgtcggtgtagtggtttctgcgccgttaggtcctgttggggtactttgtatacagcgcacactgaacaagggacgatggtatggatttgttaccggtctgggagctgcccttagtgatataggctatgccttgattacaggttatggcatgagttttatggatgatttcttggcaaagaaccaagttttgttacaaattatcggcagtatcatgctgttctttttcggtatttatactttccgtagtaatcctgtccagtctatccgtcctgtatcttctaccccgggcagttatcttcataattttgttactgctttttttgtgactctctccaaccccctcattatattcctgtttataggtttgtttgcccgtttttcttttgtgatgccgggcagtcccataggctttcaactggtggggtatttggctattgtattgggggctcttctctggtggttcggaattacgtattttgtcaataaagtacgcacccgttttaatttacgcggcatttggattttgaaccgtgtgattggtattgtagtgatgctgatttcagtcgcaggtttcatttatactattttaggaaaaacgatgtactgacaaagaaacatatcttgtgtatcatacgttggttttttaattttttaattatcaattttaatttaaaaagtatgttcgtttccaggcagttaaaagaaaagaatatagccgagtatcttatatatatgtggcagatagaggatttaatccgtgccaacggctgtgatatggaaaagataaaaagcaccatcatagctccttatccgttaacggaagagcagaaagcggaactcacccagtggtatatggatttgattgagatgatgcgtcatgaagggattatggaaaaaggccatttgcagattaataaaaacattataacttggcttaccgaccttcatttgcagttattgcgttcccctaagtttccttattataattctgcttattataaagtattgccttatattgtagagttacgcgctaaaggtgcggataaagaggagcctgaactggaaacttgttttgaggcgctttatggtatcttattgttgaaattgcaaaagaaagaaatcagtgaggaaacaagaaaggcacaagaagcaatctcgacattgctggctatgttgtcaaactactatatagaggataaaaaaggagaattggaattctaataaatgaaatagaaatgaagaatatattggtgactggtgccaacggtcaattaggaaatgaaatgcgtgtgctatcggctgaatacaaggaatacacttgtttttttacggatgtagccgaattggacatttgtgatgagcaggcggtgatgactttcgtaaaagagaataatattcatgtcatagtgaactgtgcggcctatacggcggtagataaggcagaggatgatatagagttatgcaccaagctgaataagaacgcagtgagctatctggcgaaggcggctgaagccaactggggtgagtttattcagatatcaacggattatgtgttcgatggcacgaaacatcttccttataatgagggggatgttccttgtcccaattctgtttacggcaagaccaagctggccggtgaaacgaatgcattggagtattgcaaaaaaacaatgattatccgtaccgcatggctttattccacttttgggaataattttgtaaaaacgatgctccgtctgggaaaggaaaaggaaactttgggtgtggtctttgatcagattggtacaccgacatatgcccgtgatctggcacgtgctatctttacagccatttataagggagtggttccgggagtttatcatttcagtgatgaaggagtatgttcctggtatgattttaccaaggctatccatcgtattgccggtatcacgacctgtaaggtcagtcccctgcatacaaatgaatatccggcaaaggctccccgtccccattattccgtattggacaagaccaagattaaaactacttataacattgagattcctcattgggaagagagtctggaagcatgtatcaaagaattaaatgcataataaaatatgaatagtgaaatagaaagaagacggacgtttgcgattatagcgcatccggatgccggtaagacctctctaactgaaaaattgttactttttggcggacagatacaggtggccggagccgtaaagagtaataagataaagaagaccgccacatccgactggatggacattgaaaagcagcgtggtatttctgtgaccacttctgtgatggagtttgattacaatgattataaaatcaatattctggatactccgggccatcaggactttgccgaggatacttatcgtactttgacagccgtagatagtgtcattattgtggtggatggtgcgaaaggtgtggaaacgcagacacgtaagctgatggaagtatgccgtatgcgtaatactccggtaatcatatttgtcaacaaaatggaccgtgaggcgaaagatccgtttgatttgttggatgaactggaggaggaactcattatcaatgtacgtcctctgacgtggcctattgaaagcggtccccgtttcaaaggtgtgtataacctttatgaacataaactgaatcttttccaaccttccaaacaggtggtaacagaaaaagtggaggttgatatcaatacggaagaactagacaaccagatcggtgctcctttggctgaaaaattgcgcggagaactggaactggttgacggtgtttatcctgaattcaatgtggaggagtacctgaaaggcgagatggctcctgtatttttcgggtcggcattgaataacttcggtgtacaggaactgctggatacatttgtggaaattgctccgagcccccgtcctaccaagacagaagaacgtgaggtggaacccgatgaaccgaaatttaccggatttgtctttaagatcacagctaatatcgatcctaatcatcgttcatgtattgcattttgtaaaatttgttcgggcaaattttcccgtaatactccttattatcatgtacgtcatgacaagacgatgcgtttttcttctcccactcagtttatggcacagcgtaaaacaacagtagacgaggcttgggcgggagatatcatcggtttgccggataacggaacgttcaagatcggtgatacgctgactgaaggtgagaaacttcatttccgtggaattcccagtttttcgcccgagatgtttaaatacattgagaatgctgaccctatgaaacagaaacaattggctaaaggtattgaccagttgatggatgagggtgtggcacagttatttatcaatcagtttaatggacgtaagattatcggtacggtagggcagttgcagtttgaagtgatccagtatcgtctggaaaatgaatataatgcaaaatgccgatgggagcctatcagcctatacaaggcatgttgggtggaaagtgatgacccggaagaactggaagctttcaaaaaacgtaaatatcagtatatggccaaggatcgtgaaggaagggatgtattcttggctgatagcaattatgtacttcaaatggcacaaatggacttcaagcatattaagttccattttaccagtgagttttaatttgttgttggaggtggtcaaaaatccctaagggatggacacacctccttcttgttttcacgaaatattcttttttactttattcctctggctttataaattcgttctttagcgttattaatttgttggaacttctcttctgccgcttttttcacatcttcacccaatgtagcaacacggtcagggtgatgttttaatgccagacggcgataggctgtacgtacttcctcattggtggcggacgggtcaatttcaagtactttgtaagcttcttccaatgagtttccgcttaagttcagcatggattccacttctttgggcgacagttccatgcattgtgccacttcttttaatgctgctatttcctcagagcatacgcttccgtcacttttggctatgtttaccagaaagtccaacaattgcagccgttgttcgtaaggcaggttcgcggcaatctgtgcaccacattcatggatggtatttttaaatgccatcgggttttgacgctccatctgtttgcgctgttcaaaaagattcagcaaaatctgttctccttggatgactgcctcttcgccgaaattcattcttaagaattggcgtacatattccatttcgctgtgcatgatgcgtccgtctgcacggatgatgtaagacgccataaccaacatggagaataaaaagctattccgctggccttcgtcatagtttccggcttccgcctgtcctttttcgtatgtattgccaaaaagtccgttgtttccatccagcaatgagcctaaggcaaatccggccaaagctcccagtggtcccatagtcatgaatcccagaataccaccaatccattttcctgctcccattattcttttaattttttcgttttggatgcaaaaataaacaatcttggatgaaaaaagtctctttgccgcattttttactatctttaccagtcaaattaaaaatactatgtttcagaaacttgtagcaatagaacctgtcagtctggttctgtcagcagaaaaagcgttatattcttttgcagatgaggttgttatgtactctgatattccggcgggggataatgagattattgctcggatcggagatgcggatgctgtattgttaagttatacatcacaaataaaccggtatattttagagagatgtccgaatgtccggtatatcggtatgtgttgttcactatactctcccgaaagtgcgaatgtggatatccgttatgctaatgaacgcggtattacggtgacaggtattcgtgactatggtgatgaaggggtaatagaatatgtagtcagcgaactggtgcgttgtcttcatggattcggtcagaagccgtgggaagggattccccgggagattaccggcttgaaagtgggtattgtaggcttaggaaaatctggtggtatgatagcggatgcaatgaagttttttggtgcggatatagcttattatgcccgtagtgaaaaaaaagaagccggtgcgaaaggttatcgttttatgcctttgaatgaacttttgacatggagtgaagtggtatgctgttgcttgaataagaatacggttttgttgcatgaggcggagttcaaggcacttggaaataggaagatactatttaacacaggattgtcacctgcgtgggatgaatcttcgtttacccgatggttggaggaagataatctttgtttttgtgatacattaggagcattggggagtacggcattgcttacccatccgcatgtgcgttgtatgcaagtatcaaccggccgtacccgccaggcgtttgaccgcctgagcgagaaggtgctggccaatttgtcagaatacaatgggtgaagtgatattgagcagggtgttcactacagaccatcctgcaatctctgatgtggcgctgtacacttctactactgcgtgtacttgttcatttttgatttccactttttgagtatcacctgtaaatccaggggtggactgtatggatacctgcatattgtccggtcctacggaagccaatgaggctgcgacagatacatttactttggttggaaaaacatttattgcctctgttgcattgccggaaaagacaatgcgtctttcctgttgcagctcttccttgtaaaccgatgtgcctttcaaagcatcaggtcctttttcattgaaaaaacgagctgtagcatttcccatcaaagaggtggttcttaatacatcaaatcctccggtggccccggataccaagtaaacccgtgtatcgtttgccttggccgtttctttgactttctcataaaaagaggtgtctgccaaagctcctatggatagggtgataatggaagttccgttttccaaggtgggtaaggccagttctttcattgcggcaggcgaggctgattccaccagataatcaggttttaattccaacagttcttttaaagtgtgacaggctgcacacatttttccgtgttgcctcattttattcgcaatgtgttcggcctttgatgccgtacgcgaatatacgcctactaattcatagtcgggcaacattcctttgacaactgcgtttgttataatttcagcaagtcgtccacatcctactataaccaatctattcatagaacaaagatagtgattttcatcatataaacctattttgtggaaaatggaatttattgtgatgtatttcttgttctatgggtatgtctgtccgagctgttttgaaatgtttgcacttagtaaatggcaaagtatctgaacttcgatgaaatgggaagaaatgaaaatctactcgtgaaaaagagatgtctatgacgaatctaaaatgaagatttaaggtaaatctaaggtcgtttcttcttgtttttatgaatagtttgtttactttgtgccagataagtaaatatagaaatcaaatgaaaaacaaacaactattatgcgttttattccctttgttggtggcgtgtaccgggcaacgccaccaacagcaggtatccagtgagtcaatcatagaagaagcggtgcggaagggagaagttctgaaaggggagattgttcccattgatacggctctgttccggtatgcctatcgtatgcgtgtacagggtgacaaggcggtgatattggatttgcacaatgccgattactattatcatgtatttacttatcccgattttcaatatcagtcttcttttggaaagcgtggggaaggtccgggtgagtccatttatgcggcgaatatccgttttgcagggcaggacacggtgtgggtgcttgatgacggcaagggcaggatgtatcaatatagcggtatagccggggggaaaactcccaaacaggaaaaggatattttgttggataagcgcttgttccgttcccttgattttgatttgaaggatgcctctactgttgttatccccgattattccggtgagaaccgtttcagttgggcttcactctcttccggcgaattgcttcgtaaatccgagcagatacctgtgtccgatccggaactgttgagagaaagtgcgcctgctgtggctcaaggctggaacagttttgtatcattcagtcctgataagaagatattggtttctgtcactcagtttggagataggctcgatatttatagcatggcttcacaaaagcatataggagaattgggtggggatggtgaaccccaatttaaagtgagtcctgaagggtatggacttccggcggggagaatctgttattatgatgtgcaggtgactgaccaatacatttataccatttatgacggtcgtaaatttaaggatattatgaagttggccgatgcctatcagcagggtggtaaaatattacgtatatccacccacgagggcgatgtggtgaaaacctatgtattggatcgtcctattgccggtatttatgtagatgaggctgccggtatgttattcggtttggatgtcaatgctgacgagcagatagtgaaatttccccttgaattggaatagaggaagttttgaaaagaaatcaccgtgttatcctataatggcggataatttattgtagtgtatggttggaaaaacataagttcgttttccgaaaagaaccggatcttttttaaaaagaacagggccttttttaaaaaggttctagtgttttatgagctggactgtctgcttataccaatttagaattcatgcgttttttctttcaaatccttcatccttatgtaagatgttagttcttagctgattataatgacggatttgtacccggaaagcttcagccaaaaaaaatccttcagggtgaaggaatatggatgattttcaagtttgctttcatagagtttaaaagtgagaattatctgtcacactgtcacagtactaattattttgctgaaaaacaggttgttaagatgtgacagatagcgtgacggagagtgtgacagataaaagtctgtcacagtgttattgtcctgcactgcattgtcctgtggcctataatgaatgaatcagaatatagtaacgagaatctctttgtttcccgtgtattacagtgtgttccactgtttggtacaattaattttatatggtggaacaaatagttttatatggtggaatatttagttttaccttgatgaaataaattattccaccttaatgaaacaactcgttccgctgtgagaaatgctttgttcctgctgcggtgggttggtgattttaagtaagattgtataccttatgtatgcttattattggaaataggagctattcattcgtttgaggagataaccagtcggtatcctcctttttctgtcactatctgatattcgggaaagtccttgagtgaggatttaagggtggagatatgactatatattttattttcgggattgttatctttcggccagaaagcatttttaatatcttctttagtcaaaagatgcttgggcgttttgataaacagttccagcagattgaaatctgccggtgctatgtggcaaagccggtcgccaatatatagtttcttgctttccaactttaaagtcattttccccaattgtatgtagtccggattgtcaggaatttcttcacatggtatgcagtccggattggcgggagtttctttttcctgtggttttttcagaaatgacagagacacccatatcaagacaatgaaataagcaatgatactccataacacttttggagtggtatgttttactatttctgtccaatgaatcatagcccatgcctgtacgccggcggttcttttagcgtctattgcttgtacaggggtgacaagagctttctggaaagagattgaatcattgtcactgaatacctttttcttgttggggcagtaaatgattcccgtcttagcggcggaaactccattcttttcccattcttcttggaagatcttattgaaattgtctggattgacggggataatccttgtcatcacatactggttggccagttgggtagccagtgactcatgggtgctgtcttcaaaataaatgatttctagactatcaccgtattctatttggacaccttttacctttctgcctaaagggcgataatgaataagaatcttgtttaagcgttcttgataatcaatattgattgcttcacgtaggctgtccttcattgttatcagaacatttgttttttcatctttaaaagcaacataacatagcaggatgaatacaatccatcccaatgcaataaagctaaacttgaataagtttgtcggtattttcatgtttcttgttcatgttagagattgcaaagatacgcatatttataaaaaaggaacttataagttaaaaaaagaatatgatttaattggatgaaccttatgatttggagatcagggcattaaaataatccttccgatgaaatggggattttttgaatcttaagaaaactttaaggtcaccttaagatcaatttaagggaaaaaatttgcgtgcccgatagatgttctctaccttcacacaaaaaatgataaaccaatgaaaaaagtatttgtgttatttatcgttgttatgctaatggcggtaatggcttgggaaaagcaatccggaaagccggtagagagtgagtttcttttagataatgtggaagcattggctgcaggagaatccgggtatgatacatgtctgggcagtgggaatgtgacttgcagtaccggagacaaagtggaatatgtgcttataccttttggcctggattaatcaatgagatacctttgtctattactatgtgtttttgctcttttttcctcctgcaaggaattcctacccattccatctttactattcaagggaaggatacagtggacttttctttagcggatgcggattataaggtagtgacttatatcgattctgtaggctgtaccagttgtaagttacaattgcctcgctggaagctgtttatgcaggaagttgattcaacgttgaaccgtctggttccctttgtcttctatttccacccgaaagatatgaaagaactacgttatatcacccgtcgtgatgcatttatctatcctgtttgtttcgatgaaaaggacgattttaaccgattgaatcactttccggatgaaatgactttccagacatttctattggataaagacaacagggtggcggctataggcaatcctgttcacaatccaaaggtgaaggaactttatttgaaagtattgacaggtggtgaagttgtaaaagcggaaacaccgataacgaaagtcagtctggacgtaacaagcatagacttcggttcatttcctcagtcggagaagcaggaacgcaagttcacactgaccaatacgggacagcatgtactggtgatatacgatgtcatcacttcctgtggatgtaccaaggtaaactataataaggagggtgttcgtccgggagaaaaagcggaactgaccgtgatttatgaagccgaaaaggctgagcatttcagtaagacggttaccatttattgcaatgcagataattctccacttcgtttgaaggtaacggggaatgctgaataaaggatgaagtatgaatcaatgggagtaaaaagcggatggaaagaaattcattttctttgccgaaagtcgattctttccaccctgtggctctctcctaaaagaaaaggaggttaagtccgatgtaaaagtagtgtaaataatcagaataagcaagcggtatttttgttttttctgcggtggagttctttccgagaataagatgaaaatatgaataataataattttttttactagaaataagatgaagaagaatattttgaaggcaactttggttgttgcgtttgctttgatagcaggaatgaatgtgtataatgctcagcaatcggatgtaatgtctgatttggctttggctaatgtggaagcgttggctagtggtgaatcttcgacaacaaatagataccaaactatggggtattgtgcaccattaaacatgaattatatgtgtacttcaagacgaactgcagaaagttgtcgaaggccgtgcagataaaatgagagtattatgatataaatttgaaacagctccaattcatatactccattggattggagcttattttaactttaaattctatataatgaaaaagttgatattaatatttttcccatttctttttgtttcatgtagtgtaaaacataaaaaaacatttgattatatttttaataaaactgaagcaatcacacttgagcaaagcaaattgactttgagtaaggatataaccgttctcagtttttcagattctagtatggtcgatcgtaattcatctataattaaagttgacagtggttggattgtatattcaaaaaattcagaatcatctatacttagctttactagtgatggacagttttccggttatatcggacacaggggaaatggccctggtgaatatactagcgtctatgatgtcgttgttaatcagaaaagtaaagttttagaggtcctatcagatggaggaattttttgttatacttttgggggagatttcttagacaagaaggaggttacttatcctgcgttttcttttgccatagatgataggcagaattattggttttatgtaggtaacaacaccacgtatggcgatgctaaaatgatttgtacagatgaaaatatcgccaatgtggcatattatcttcatcaaaagtctaatatgcttccgatggtagagaataattttggaagaaatggagaatggttgacgtttcatgagtcgctaaatcatgatttgtatacgatagaaaatgggaaattggacttatcatatgctatggactttcctaattataagctgcctaagaaattacatgaattatcgggcatggaagttatagaagaattgcagcgttctaactatgcatctattataaattatctggaaaatcatgattatatatttttaaatgttttattgaacaatgaaggtgaacgaatcccagaggtttattattggattattagtaagaatttgcaagaggaagttatcatcaaaattgatggtggaatttctgcagaatcctatttgtttaatactcagtatttgtctaatgataataaattatattgtttggggtatatatgggaaaataaggatatggaatcctttgaggaaaatttaaatccttctgtagtagcacttgaatttaatgaactatttagtaaagtacgatgacaaatatagtatctttattttattgtaagtgtgaatccttattctctccttttctgaaaataagatgaagtaactaattattgaaactaaaaatatcaattgagtctgattcttcagactggttgaaatgtagttttactcaggtacataatttaattcctgtgttttagattgtatcagatagcgggaagaataaggtgtgttttgagtttagttttaatttatgttttcgcaggggtaaattatactattccaccaaattaacaaatgaataatattatgttcttagcaagactccttgtcctattttcattagtatgtatctcttgtgcccactcttcttttgagcagaaacaattgaaacatgctttagattttgctacttctaatcgtttggaattggagatactgcttcagcattatacctatgattctttaaaattggaagcggctaaatttttgatacggaatatgcctcattgctattcctaccaacagggaggtgaaatggatagtgtgaagcgtgtacgtacttattatagtcctttcggacaaatagaccagacttatgccagacgttgggggcattatacctatcgtaatcttcctaaaatatatgatgcccatattatcacagccgaatacttgatagacaatatagaccgtgcttttgataattggcagaaacgtccatggaaccgttctctttcatttgaagatttttgtgaatacttgttgccttatcgtataggggatgaaccgctggaagaatggcgtgaactttatgaaaagaaatatggatatttattagattccatatataaaggcagtgatgtggtggaggccgcgaatttggtaagcaggcatctacaagaacctgtctttatttattgtgaagactttgaactgcctcatatcggtcccagatatttattcagccatcgatatggtagttgcgtggatgcggcggatatagtgacttatgcatttcgggctgtcggcattccttgtatggaagatacggatgccagagggggacatgtgtggaatgttgttcgtgacacgacagggcgcgatgtacctatttggtatatagcttcggaggctgtaagggggagtagggatacgggagggtataaacgtggcaaggtttacaggcccatgtatggttttcaagaagaaaaggcagcacatctgggagatgattggaaatcaatgccgcttttattctatcacccttatatgaaagatgtcagttatgcatattatccggatacgttacgcatacttaccggtattcctgatgatgaggtttgttatctggcccatttccacgaagcgcattggtggagttgtgcctgtgcacgctcggcaagcggcaagatggaaatacctaatctagaatcggaactggtatatcttcccattaaatataccaaaggcaattattatccttccggcttccccttttggtttgcaggtggagaaataaatacgtttcttccggattgggagaaaacagtaaaggttcgtttgtatagaaaatatccggtatatggttggttgcgcagctttatgggccatgtggtgggaggtacttttgagggaagtatgacgaaaaattttgaagatggaaagacattatatgagatagcggatactcccgtgatagcaaggaatagaatctttctgaataagtcggttaagtgccgttacataagatataaggctgacaatgataaatgtgcggaactggcggaaatgacattttatgccaatggaaaggctgtttctccgatagcggtttgggggagtcctacggaaaaaggaaatatgcatgtgctggcaaagcacgtggcggatggtgatcctctttcttattatctgtctttagacaaaggaggggaggttgttgttgatttgggccgtgtcgcagttatagattgcctggagtatatgccccggaatgatgacaattttatttctccgggtgatatttatgagttgttctgtcatgccggtactgaaggatggaagagtttgggaaaacagcgggctgatactacctgtttggactggattgtgcctgacaatgcattgttctggttacgcgatctgacccgtgggcgtgaagaacatattttctttatgcagaacaggcggcagaaatttccaaccttttaagatttaaaatgaggtatataaagaaatacataggcgttttatataacttgctggtttgtgtgaccggagggggtttgttaatgatgattatttggttgttattacagatatttgtttttgcctcatttgccataccttctgactccatggagccggttctgataccgggtgactatgtgcttgtcaataaaatgttgaaaggaccacgtatattcagccttggtgatgcccggcaacataagccgctacacatcgatcgtttgaagggattcagtgaatttcagcgcaatgaggtattggtctttaatttcccttatccggaacgatgggacagtatagggtttaacctgatgctttattatgtaaagaggtgtatcgcattgccgggtgatactgttgaaataagggacgcccgatatagggtcagaggttatgataaggaattaggaaatatagtttcacaaaacagtttggcgcattttttggagaaaccgaggaatgtggagaaaatgatacaggaaaattgtttttttgcttatcccggtgataccatcttaaaatggagtattaaagattttggtcctttttatcttccttcccgtggggatactattgtgatggatgataaacattatttgctttatcgcaatcttatagaatgggagcaacaagataaattaatagcaagtaacgggcatttttatttaaatgggcgggaagtggagcattatgtttttatgcacaattattatttcatgggtggtgataattgttataattctcaggactcgcgctattgggggcctttgccggaggaatatattgtaggaaaggcgacattgatatggaagtctaagaatggagtgacggatgaaatacgtatggacaggatatttaaaaagataaagtagtatgagagtttgtggtgtatattttgtttttgtaattcttctttctgcttgtacgaatggagtaagtcatttggatattgctttgcagcaggctaaacataataaagcggagttggaaaaagtgttgaagcattttaaacatgatagcttgaaataccgtgctgcctgttttttgattgaaaatatgcctggtaaatattcaatactcccttatgattcgttggatagatataagaactttttgaagattatcccacaaaatgatcctataagttgggatgtgcgatattctaagatttggcatggatttgattctatttctaaacgacagttggcaggttttagtaagattgaagatataaaagttataacgggagattatttaataaaaaatattgaatatgcttttaaaatatgggagaatggaaaaataaaagattactgttcatttgatgaattctgtcattatattttgccttaccgtatagaccatgagccattatcgaattggcgcgaggaaggttttcaaaagtttggtcatttattggattctttaatgtctccacgagaattggcccttcgtatcataaaattaggtggaatgcgttataatataggaatgactaaatatccttataaacagtcttatgctgaaatgctacagacccgttggggtacttgtgatgatatggcggcatttttagctttgtctttacgtgccattggaatccctgcttctattgattatgttccggcatgggctaataggagttcttcgcattgttggaatgtggtgaaagatgctactggtgattttatagaagtgggatatggccctgaaggaaaaaatgaagttgtatacaagatttctaagatttataggaaaaaatatgatattccactatgtgatgttacatccgaatatgctatgcctctttctgatttaacctttagagtgccttcacagaaagataaacaattaatcagtctttgtacttttaataatcatgactgggttcctgttgctttatcaaaggtgatgaatggaagtgttttgtttgaatcagtcgggagaggaattttatggggagataatcaaataagaacttatttaaacgaaggaaaggggatcgttttcttagcatttatcagccaaaatgggcggttgaataataaacctatagggtttcctataattcttttagaagatggaaccataaaagagctgtgtgctagtacagaaaaagaaagtattatactttaccgtaaatacccatattatggaagtaataatgcaataatacatgatagtaatgaaatatgtgtcgataatgaatatgaattgttctattggaatatgaaatggattagtttagggcgaaaattagcagtcgacaataaacttcattatgatgatgtgcctaaaggcgctttattgtggttaaaaaatcatactcaagggaaagaagagcggatttttacatacgaggacgggaaacaagtttggtggtagagatggaaaataaatggtcgaaatatggaatggcattggtggcaggcataccggttgccctgtgcctcagcgtggtgtgttgtggtacgtcttcactgtcatccgatattttggcggatgactggcggtggatgtatgcctgtggagttctttcatcggcagcttttgccctgttgatatttctttttccggcacggattaaggaatgtctgtcggctgtcgtttcatgggtgtttattctatacggaggtatagaagccgtttggggcatccgccaggtatacggatttacctattccaaccattccctctatgccttgaccggctcgttctataatcccggtccttactcaggctatcttgccatgatattccctgtttgtctgcacgaatggttagagcggaaagagcataagaaaaccgtaccttattatattgcaatagccggaatgctattgattctttgtgtgttgcctgccggaatgagccgctcggcatggatagccgcggcggtctctttcatttatgtttgtggtatgcactataagatggaaattcagcattatatcaggcatcatcgtaagcaggcagtgtcttttgccatagtaacctttattttgggcggtatagcattgggtggcatttatcaaatgaaaaaggattcggcagacggccgtctgtttatgtggaaaattgctgcccaagctgtcagtgagcacccatggacaggatgcggatggaacagtgttccggctgcttacggacaagcgcaggagaattattttgcagccggaaattatacggcaacggaggaacttgtggcaggtgctcccgaatatgttttcaatgaatatctgcaagtagccattgcctggggaatacctgtgctttgcatcgggttgttgatactaggtgggagcatgtacataggtcataaacaaggcatctatggactatgcggcgcattgctatctttagcggtatttgcgttttcttcttatccattacaatttccagcgtttgtttcggctttgattatattagtattagcttgcggtatccgtgttcttcctttagagaaagtttggcctcgcattttatttactgttttattgttaatcggaagctatggctgtttctgtaaatatcagcagaaatccaagactgtagaagcttgtaagcaatggaccaaaagccgtatgttttaccactcgggagcttatcagcaagcggtggaaagctatgctgaaattcagaaagaaatgaaagggaatgcccgctttatgtttgagtatggccatgccttgcataaactgcatgaacccgaactgtctaacaaggtactgaaagaggccttgaaagtgagtggcgatcccatgatactaaatattatcgggaaaaatgaacaggacatgaagcactatgatagtgcggaatattggtttatgcgtgctgtccatcggttgcccggaaggatttatccttattatcttttggccaatctatatgcggatccgtttttttatcggtgtgacaaattggagcggatggtacagacggtattggagaaagaaccgaaaattcaatctaccgctatcaagcagatgagacggaaagcacgggaattattaaaaaaagtacccgaaaattagttttttcaaaataaaaagtttttatttgttatagatatcacaaaatatgaccatgaaattacacatatttgcatcaggcttattattagccgtttctttcactgcctgctcgggagaaaaaaaggaaacaacggaaaaagaaggggtggaaacagttcttccttctttacccaatgaggtgacggtgatgccgctgaaaaagcaggttttcaatcatgaattgatcagtaacgggaaagtgacggcacaggattatgccgacctgtattttcgtacctcggaagtggtggcgaatatctgggtaaagaacggggatatagtgcggaaaggtcaaaaaatagcccaattggatttgtttaagttgaacaatacgttggtacagaataaaaatagtttggcacaggctaccctggagatgcaggatgtgttgataggacaaggatatgctcccgataatctgaaggtgatacctgctgatgtgctggaactggcaaaagtaaaaagcgggtatgagcagagcaaagctcaatatgaatctgctcaatatgatatggaacaagctacgttgactgctcctttcgatggagtgattgccaacctctttgaaaagagatataatatgcccaaaacttccgagcctttctgccgggtaatcaatgccggaaatatggaggtggatttcaccgtacttgaaaatgagctgccattgctgaaagtgggggataaggtggagattactccttatgcatcggcagcaggggtgcgccagggaagtatcagtgagattaatccgctggtggacgagaatggaatggtacggataaaggcgcgagtgaacgggagtaataaattgttcgacggcatgaatgtaagggtaagcgtgaagcgttctgtgggcgaacaactggttatccccaaaacggcggttgtactacgttccggcaaacaggtggtatttacactgaaagagggtaaagctatgtggaactatgtgcatacgggattggagaatatggaggaatatactgtcacagacggactggaagaaggtatggaggtgataactaccggaaatgtgaatctggctcatgaagcaccggtgagggtaattaaaaattaaaggtatggttaagttcttattgcaacggcccattgcggtgctgatggcttttaccgcctgttttattgtcgggttggtgacctacttttcgctgcctgtatctttgctgcccgatattgccataccgcagattaccatacaggtaacgggcgagaattcatcggcacgcgaactggagaatacggtggttacccctgtgcgcagacagttgctgcaagtggccggactgagagaaataaaaagtgaaacccgtgacggggcgggtgtgatccgtctggaatttgactttggagtgaataccgacctggcatttatagaggtgaatgagaagatagatgccgctatgaacagtcttcccaaggaagtgacacgtcccaaggctatcaaagcaagtgcaacggatattcctgtactttatgtcaatatgactttgaaaaacgacggtgcttatcaggaaaccgacgagcaacaatttctggagttgtgcgaattggcggagaatgtggtgaaacgccgcatcgaacagttacccgaagtggctatggcggatataaccggagtgcccggaaggcttttgcaaattgttcctgataaagataaactggccatgacaggtatcagtgtggaggatatagagaatacactttccgccaataatgtagagccgggaagtatgctggtgagggatggttattatgaatataatattcgcatagctaccctgcttcgtaccccggaggatgtgaagaatatctatatccgcaagggggaacgtattatgcagttgaaagagctctgcaaagtagatattgtttcgcaaaaagagatgggacgttccgtagccggaggaaaaagggcggtgacgctggccattatcaagcagagcgatgaaaatatggatgtcatgaaagagaagctgaaagaaacaaccgattattttgcttctctatatccggatattgaattcagcgtaagccgtaatcagacggaattgctggactataccatttcgaatttgcagcagaacctatctttgggtttcttgtttatctttattgtagccgtgctgtttttgggggatgtccgttcaccgttgattatcggcatcagcatggttacttctattgtaatcacattctttttcttttatttctgtcatgtgtcgctgaatgtgatatcactttcgggcttgattctggcagtaggtatgatgatagacagcgccattattgtaacggaaaatatttcgcagtatcgtgaacgggggtattctctgaaacgttcgtgtgccgtgggcacgacggaaatgattacaccgatgctcagttcgtcccttacaaccattgcggtatttgtgcctttgatatttatgagtggcatagccggagctatttttatggatcaggctttttctatcacggtgggattgatgatatcttatattacgggtattatgttgctgcccgtattgtatctgttgttttataaggtcggtatccgcagtaagggatttctttccagacgttttgacaatctgctgaaaaatgagtggctggaaagcttttatgataaagggattgactgggtgttctcacataaaaagctttgtgtgaccggcacgctggcaacccttccactgtgtgtgtttcttttttatgtaatggaaaaagagcgtatgccgcagattgaccagaatgaactggtggcaaggatagagtggaatgagaatatccatgtggacgagaacaaccgccgggtggatgatttaatgaaacaggtggacgaccgggtaacggagcatgctgcttatgtgggtatgcaggattatatattgaacgggggcagtgaactttcgtctaccgaagcggaactttatttcaagacggaaaagccatccggaatctattcattgcaggaattattagagaaggagataagagagaaatatccgttggctgtggttactttctcacctcccgaaacaatctttgaaaaattgtttgtgacaggagaagcggatgtggtagcggaactccatacggcgaataagtcgcaggcaccggatgcggagcatttgcagcggttggaaaaggaaattacgcgggtggcggataatgttccgacgggcatcgctttccggaatcagatgaatctgataatcaataaagaaaaactgttgttgtataacgtatcatatgatgaattgacgcgggtgctccgcacggctttcaaagaaaacaaggtttccgttttacgctcttatcagcaatatctgcctatcagtattgccggagaggaaaagagtgtaaatagtgtattaagtgaaactttggtgcggacgatggcggatggtaacggagaggtgaatcatattcctttgaataatctggtgacggtagtgcccgccgaagatttgaagagtattacggcgggaaagaacggagaatatattcctttaagtttttatgatgtgaaggatgcaccggaactgatgcggaatgtaaaagaggtggttagtgaggaaaaggaatgggaagtggatttctcgggtagtttcttttcgaatgaaaaaatgatgggggaattgactgtgattctttttgtttctttgttgctgatgtattttatcctttgcgcgcaattcgagagtttcctgcaaccgctgattgtcttgatggaaattcctattgatacggcttttgctttgctggcattatgggttttcggtcacacgttgaatttgatgtctgccataggcattatcgtgacttgtggtattgtggtgaatgactctattttaaaaatggatgccatcaatgaattacggaaagcggggatgcctttggtggaagccattcatacagcgggcaggcgcaggttgagagcgattatcatgacttcgctgacaactgtctttgcaatggttccgttgctgtttacctcggatatggggtcggagatgcagaagcctttgtctattgccatgattggctctatggtggtgggaactttggtcagcttgtttatcattcctttaatatattggtttatttatagaaaacatgacaaaaatgaagtacattagcatatggatggtggggtgtatgctgttgtctctcggagcaaaggcgcagcaggtggtgaagctggatttgcaacgcacgatagagattgcgaatgatagttccttgtccgctttcagatatcagaatctttatttgtcgggatattgggaatatcgtacttacaaggcgaaccgtttgccgagtcttacgctggatctgactccggctaaatattatcgctatatcacccagcgttatgattcgaatgaggatatggatgtgtatcgtgaacaacagatgttcagcgcatcgggtggattgagtatcaaacagaatctggactggacgggcggtactttctatattgattcggaactggactttatgcgtaatttcggtgactcaaagtctacacagtattccagtatccctgtgcgtgtgggatatcaacagagcctgttgggatataatgcttttcgttgggaccggaaaatagagccgttgaagtatgaaaaggtgaagaagcaattcatttataacacggaaatggtttcagaagaagcggtgacttatttctttgcgttggctatggcacaggcggattaccgcttggcggaggagaatgtggcgtccagtgataccctttatagcatcggactccagcgtcataagatagcagccatatcacgtgccgatttgctgacattgcagctggacaaagtgaatgcgcataatacgttgcagaatgcgcagattgctttgaaacgcgctatgttttcattggcttcctttctgaacctggataagaatactgtgattgaattggatataccgggacgtcccacaggaaagatgattcccgtagatgatgcgttgatgcgggccaaagagaataatcctactttcctagaacaacggcagaatgtgctggaagcggaacagaatgtggacaagacaaagaaagaatcccgtttcaatgccagctttaatgccagtgtgggctttaaccaggtggcggataaactgggagatgcttacaggcatcctttgcaacaggacttggtttctgtcagtgtttctattcctttgattgactggggggtgagaaagggtaaatataatatggcgagaaataatctgaatgtggtgaggattgccgcccgtcaggaagaactgagtgtggaggaagaggtgattatgacggtgaatgattttaatattcagcagagtttgattgcgagtgcggaggaggctttggatcttgccgtaatggcatacgagcagacacgccaacgttttatcatcggaaaggcggatgtgaatagtcttactctttcgttgaaccgccagcaggaggcgcagaaaaattatatttcggctttgcagaattattggttgaattattataagatacgtaaactgacgctgcacgattttgagtccggtttttcccttgcggacaagtttgattttaatacaggaatttatcgatgagtaatccgcgtaacctctcctcgtttaccttgatagtgacatttgtctgcctgtcactgataggggtggtattagtaccgctgttgccggttaagctggcgccgtcgcgtaccttgcccggtctgactgtttctttcagtatgcccggcaattcgtcacgggttattgaggcggaggttaccagtaaactggaggcgatgatggccagagtaaagggaatcaggaaggtgaactctacttcggataacggcagcggctcaatttctttggaactggacaagcatgcggatattgacgttacccgctttgaagtgtctaccatcatcagacagacctggcctcagctgcccgagggggtgagttatcctcaaatcagtacgcgacgttcggatgataaggcatccagaccttttattacttatacactgaatgcgcctgccaatcctattttgattcagcagtatgcggaagagaatatcaagccggtattgggacagttgaaggggatttataaagtggaactgaatggagctacacctatggagtggcagttggagtatgacagtgaccagctttcgcgtttgggaatcacactgcaggctgtgcaacgggccattaaccgccattatgaaaaagagtttctggggatctgttctattgaaaaaggtgcggagggcagagagtggatcagactggtacgtacatctactgaaaaagaaatggaatttgaaccgggagccattcaactgcaagccgaagatggaacgatggttacgctggataaactgataaaggtaaggcatgtggaagaacgaccgcaaagttattaccggataaacgggctgaattctgtctacctgtatatcacagccgaggaaactgccaatcaattaaatttaagtggggaagtgaagcaccttatgggtgagttgcaacagaagatgcctccgggctatgaggtacatatcagttatgacgctacggaatatattcagaaagaattggataagatttatttccgtaccggactgaccgtattgattttattgctgtttgtagcgttgataacacgaaatctgcgttatctgttcctgattgtgaccagtctggcggttaatatatctgttgccgtcattctttattatgcatttggtctggaaatgcagctttattcattggcgggtattaccatctcattgaatttggtgatagataatacgatagtgatgacagaccatattctgcatcgccgcaatctgaaggcgtttgtttctgtactggcggccacgctgactactatcggggcattggttattattttctttctggatgagaagatacgtctgaacttgcaggattttgcagcggtggtcattatcaatctggcagtatctttgtttgttgcattattctttgttccgtccatgattgataaaataggtttggaaaagaaaaagagaagaaaaagaagacgttttctgctcagacccacttttatgaaacggttgactgtctattttacccgtttctatcaaggggtgatttattatttatgccgtttcagggtgatagcttgcctattattgctgctggggttcggtctgcctgtatttatgctgcccgagaagatggaaggagaaggtaaatgggtggaatattataataaggtatttgataatcctaccttcaaggataaggtaaagccggtaatcaacaaggctttaggtggcagcctccgtctttttgcggaaaaagtatacgagggaagttatttcaatcgtgatgaaggtgaagtggtgctttccgtttatgctacgttgcctaatggcagtacattggagcagatgaatgtgctgattaagaggatggaaacttatctgagcgatttcaaggaaatcaggcagtttcagacgtatatctataatgcgcgtcaggctaatatccagatttattttacaaaagaaaatcagcggagcggattcccgtatactttgaaagctaatataatcagtaaggcactgactttgggaggtggtagctggagtgtatatggtttgcaggatcagggcttcagtaacgatgtgcgtgagagtgcgggaagtttccgtgtgaaactgtatggatataattatgacgaactttcttattggacagaacagctgaaagagaagttgttattacaccgtcgtattaaagaggttacggtaaattcggagttctcttggtggaaagatgattatagcgagttctatctggatttggacaggttgaggatggcgaaagagcatattacagccacgcagctgttcgccgctttgcgccctgttttcggaagggatatttattgtggtaacgtgttgtttgacagtcagacggagcaattgaaactttcatcggttcagggacaacgatatgatgtatggggattggtcaatatacccttttttattgatggccgttcttataaactggctgatttcgctactgtccggaagggacagtcacctcagaaagtcgctaaagaaaaccagcaataccggctttgtctgcaatatgaatatatcggttcttccgaacaaggaaaaaaactgttgaagaaagacttggaagaatttaataagatattgcctatgggatatacagccgaaaatgagcaggattactggtcatggaataagaaagataacaagcaatacgcattgctgttgattgtaatcgccattattttctttacgacggctattttgtttaattccttgaaacagcctttggctatcatttttgttattccgatatcctatatcggcgtattccttacgttttatcttttcggactgaattttgatcaggggggatttgcttcttttgtattactttgcggtattacagtaaatgccagtatttatattctaaatgaatataatgcgataagaaaaaggtatcctctgttattaccggtacgtgccttcaccaaggcatggaattcgaaaattctgcctatctttctgacggtcgtttctactattctgggatttattccttttatggtgggagatggaaaagaggctttctggttccctttggcagcaggtactataggcgggttagttatgtctatacttggaatatttttgtttttgcctatattctcattgaagaaacaaaaaagataataaaggttttacttttctttttcaatagaagtgtttacttttgttgttacaaaaaaacgttgaataaatattatctaatactcgctaatcatgttgactcaaattattaacggcaagatttttactccgcaaggttggctggacgaaggctctgtactgatacgggataataaaatattggaagtgactaactgtgacctggcactgatcggtgcaaaattgattgatgctaaagggatgtatattgtacccggatatgtgtgtatgcatgctcatggcggtggtggtcacgattttaatgaatgtacggaagaggcgttccgcgcagctataaaagcgcatcagaagcatggggcgaccagtattttcccaactttgtcttcttctcctttttcagaaatccgtaaggcggtaactgtgtgcgaaaccttgatgaacgagaaggacagtcctgtgttggggttgcatgtagaaggcccttatctgaatccgaaaagagcaggtgagcagtttgccgggaaattgaagaatcctgataaagaggaatatacttctttattggaaagtactgactgcatcaagcgttgggacgcttcacctgaacttccgggcgcgttggaatttgcccgctatttgaaatcaaaaggtatattagtggctgtgtcacatacagaatcggaatacgaggggataaaagctgcgtttgaagctgggtttactcatactgcccatttctataacggtatgccgggattccataaatgtcgtgaatataaatacgaagggacagtggaaagtgtttatctgacagacggaatgaccattgaattgattgccgacggtatccatttacctgctactattcttcggttggcttataagttgaagggagtggaaaaaacttgtttggttacggatgctttggcatatgccgccgctgatggaatggaaataacagatcctaatgtgattatagaagatggtgtatgcaaaatggctgatcattcttcattggcaggtagcatagcaaccatggatgtattggtacggacaatggtaaaagctggtattccgctggccgatgccgtgcggatggcttctgaaactccggcacggattatgggagtggatgaccggaagggggcattgcagaaagatatggatgccgatgtgttgattttggatagagaactgaatatccgggcggcttgggctatgggcaggctggtggaggatacgaatactttgttttaaaatagaagataaagggagaattagtatccttattgtgtggacaagatgccttgactgtttcggaaaacaatcaaggtatctttttttcgggtttaactcgtcattatcaagaggatttgctacatttgcaacttgttaaaatgagaaccaaataataaaaaacgatatgaacggagattttagagaggatttgaagagagcctgtgaagtgatgcagaagggaggagtgattctttatcctactgatactatttggggaataggttgtgatgcaactaatccggaggcggtgaaacgagtttatgatataaagaagcgtgctgacagtaaggcgatgcttgtattggtggacagtacggtaaaagtaaatttttatgttagtgatgtacctgcggtagcttgggatttgattgagtttaccacaaaaccattgactattatttatgatggggcacgtaatctggctgagaatttgctggctgaggacggcagtgtaggtattcgtgttacggctgaggaattctccaaacaactttgtttccggtttcgtaaagctattgtgtcgacttctgccaatatcagcggtcagccttcacctgccaacttcagtgaaatcagtgaagaagtaaaacaagctgtagactatattgtggagtatagacaagatgaagtggggcatcccaaaccatccagcattatcaaactgggtaaagggggagaagtgaagattattagagagtaaaaaaaggaatggacgcaattatagacgaaaataagaaaagttggttacagcgctttatcttatggcgcgaaaagaagataaaagagaaacactttattcttatattaagttttcttgctggtatttttacggcattggccgcatggtttctgaagtttctagtagaatggatcaaggaatttctgactgaaaattttgattctacaggagtcaactggttgtatttggtgtatccggtttttggtatttttcttaccggattgttcattcgttatattgtgaaagatgacatcagtcatggggtgacgaaaatattatatgccatatcccgtcgccaaagccgcatcaagcggcataatacatggtcgtctgtgatagccagtgccattactatcggttttggtggttccgtaggtgcagaggctccgattgtgctgaccggatcggctatcggttctaatttgggaagtgtattcaagatggagcataagaccctgatgctgttggtggggtgtggtgcggcaggtgctgtggccggtatttttaaggctcctattgcaggcttggtttttactttggaagtcttgatgattgatctgacgatggcatcattgttgcctcttcttgtttcctgtgtcacggcagctactgtttcttatattcttaccggtcccgatgccatgttcaagttccatatggatgaaccgtttctgatggagcgcattccttcggcaattctgttaggcattgcgtgcggattggtttctttgtattttacgcgggctatgaattctgtggagaatatatttcgtcgatatagtaatccgtatatcaagctggctataggcggtgcaatgctgagcatattgattttcttgtttcctccattgtatggtgaaggatatgatactattaatttattgctgaatggcgtaaccaatcatgactggaatacagtaatgaataactctatcttttatgggttcgataatttgttactcgtttatttggccatgattgtacttttcaaagtctttgcttccagtgcaacgaatggcggtggtggttgcgggggaatttttgctcccagtttgttcttggggtgtatcaccgggtttatcttcgctcatttctgtaatgaactgcatgtaggtccttatatcccggagaaaaattttgccttgttgggaatggcgggattgatgtcgggagtaatgcatgctccgctgactggtatttttctgattgcagaactgactggcgggtatgatttgttccttccgctgatgatggtatctgtcagctcttatcttaccattatgatattcgagccgcatagtatttattctatgcgtttggctaagaaaggtgaattgataacgcatcataaagacaaggccgtattgactctgatgaatattgacagtgtggttgaaactgattttgagaaagtgcgtcctgatatggatttaggtgaaatggttaaagtcatttcgcaggctaaacgcaatttgtttccggtagtggatgtcaatggagaacttttgggcattgtggtattggatgatatccgtaatattatgttccgtcaggaattataccatcgtttcaaggtggaaaaatttatgatttctcctccggcacggatcaatgttactgattcaatggaagaagtgatgaagaagtttgatgatacaaaggcctggaacctgcctgtgattaatgaagagggaaaatacaaagggtttgtttccaagtccaaaatatttaattcgtaccggcaggtgttggttgatttctctgaagattaaataatgtaagtatatggaaaagaaagatttgcggatcgtatatatgggtactcccgattttgcggtggagagcctgaaaagattggttgaaggaggctataatgtagtaggtgtgataactatgcccgacaaaccgatgggacgacatggcagtgtgctgcaacctagtccggtgaaagaatatgctgtttctcaaggtctgaggatacttcagccggagaaattgaaggatgaggcttttatagaggaactccggtctttacaagccgatttacaaattgtagttgctttccgtatgcttcccgaaatagtatggaatatgccgcgtttgggcacatttaacttgcatgcatctttattacctcaatatagaggagctgctcctataaattgggcggtgataaacggagatacggaaactggtattacgacttttttcttgaaacatgagatagataccggtgagattatccaacaggtgcgcgttcctattgctgatacggataatgtggaaatagtacatgataagctgatgtatttggggggagatttggttttggaaaccgtggatgctattttgaatggaagtgtgaaacctgttcctcaggaaagtttgatccggcaggaaacggagttgcgtccggcaccgaaaatatttaaagaaacttgccgtatagactggaataaaggtgtgaagcagatttatgactttattcgcgggctgtctccttatccggctgcatggaccgaactgtgtgtggctgatggaacacgtcaggttttaaaaatatatgaaacggagaaagtttttgcttcccatgagatgaatataggcgatatccgtacggatatgaagacctattttcaggtggctgtaaaagatggttttattaatgtgcttactttgcagctggcaggaaagaaacgtatgaatgtgcctgattttttgagaggctacagaacttcggataataataaggtagaataaatgataaaggctgtatcgaaagattttcggatacagccttttcgttacaataagacaaggagttgttaagaatcatttaatttttgtgttggatatacctttctgtatgaacggaaagtttgtagatttacttttattataacttactgtaacggtttcttcgccattgttaatggtattcatttttattttaaatccttgtagcttaccctctttatatccgggaacatccaataaagggaaggatacataaccggaactcggatattcctgtctgtcaccttcggcattgtggcgtaattctacagccatatatccgtttgcgtcaggaacagttccttctgtggctacaaggctgatccgatgtttgatattagagttgaaacctaatatttggaacataagggtcaggtgtgtcttacccataatgggagtgatgaggttgattccatcatgtccgtaaatatcttcatcgttttcttttagtgtatccattggtttggttaagatcttctgcaagtaatctatagaaataaaaggtcctttcttacttgcatctccggtcggattggctgcatttatataggtataaaaaatacgttgtcccggattatttgtttcaaaacgtgttaatttatcgggattcactacgtatgcgattccatcattatcgctttctatcactgcttcaccgggtacttcactgggagttactacggttgctaaagcggcgttaaaaggcatttctgcttgtatgtcgtagatgtcatcatcatagtcattcaggcaagactgagtaaatggaatcagcattgccataattattacaagaactgtcgctttatattttctcatattttctgtttctagaattgtttctatcgcttaaatgcgaagatagtaagtttactgcttgtaaaaatgttaaatctgcttaagcaaaaattttattcttccggatgcagtatttttgcagtcttatcatttatccaataaagaagtgtcacaaacaatgaatgaaacagaattggtggaacgttgcggcaagggcgataaccttgcacgcaagcaattgtatgagcgttatgccgggcaattgatggccatttgtgttcgttatacaggtgatagggaagtggcacaggatgtcttacatgatggatttttgaatatatttcgttcattcagtcaatttacttataaaggagaggggtcattgaaagcatggctgacacgtattatggtaaatgaagcactgggctatcttcgcaagaaagcttctacaaatcaggaagtgatagtcgaagagttgcccgatgtgatagatggagatgaggatgattttgagcaaataccccaatctgttttaatgcaattcattaaagagcttccggatggatatagaacggtctttaatttatatgtattagaagaaaagggacataaggagattgctgaaatgctaggaattacagaacatacgtcatcatctcaattatacagagccaaaaccttattgatgaaaaaaataaatgattatagaaagaggatataggaatgaaagaaaaagataaatggataaaaaatttccgcatccggatggagggctattcggaaccggctcctgctgatctttgggaacagttggaaaaggaactggatacggttccgaaagtaattccgatgtggcgccgctggcaggctgtagcagctgttgccttgttagtggttgtgtcttcattgaccgtatggttttggcagtcaccttctgcaaactatttggagaaacagtcggcagagttgaatgtaatgcacgaacccgatgagttggtgccgggatcaatcactcctgagcaacctatggccttggtagttcctgctgcccgctctgggaaaaaacaacatgtaaaagttggtggggttgctaaggcagaggcattggctgccgaacaggaggttttgctaaataaagaggtggaagagatacaaatagaggaaaattatattgaagagcagaaagaggaatctgttatagtggaacaaaaacagcagaaacaggccggcagatcttcctattcggctgccaaaacgaattacgcttacgtggctcctcatagaaagaaggacagaaactggtcggtaggactttctaccggtaatggaaccttttcatcctcgactagtatggatggatatttgcctttgcctaatggcacaaggaatgcaacaatgaatagcgcttatggagtggaaacaagggctgaaattgataagctggttcagttcaataacttgtcggaaggaaaggatgcgcagtctgatataaaatatcgtatgcctgttacttttggagcttcccttcgttttgatttaagtgatgattgggctgtagaaaccggggtgacttatacccagctttcatccgaaacacgttcgggaaccgaaaaaaacaattatggttgggaagagaaactgcattatgtgggtattcctctgaaagtgaaccggaatatatggagtaacaagcggtttgaagtgtatgcctcggcaggtggagcggtagaaaaatgtgtgtctggaaagcggagcattatcggcagtgtttctacatcaaatgcaggaaaagatgaacagttttcgggaggggaggaaaatgtcaaagtgaaacctttgcaatggtctttgtccgcagcggcaggtgcgcagtttaagattacggagaaattgggtatttatgcggagccgggagttgtttattactttgatgacggcagtaatgtaaatacgattcgcaaggaacatccttttaattttaatatacagttgggtgtgcggtttactttgccgaaataaaatgaactttttcactgttcttatataaaatatggttatctttgttctgtataaaaagaataagaacagtgaaccatgaatagacctctgatatccccttctttgttgtctgccaattttgctaatctacaggcagatatagaacaaataaatcgtagtgatgccgactggctgcatattgatataatggatggtgtgtttgtaccgaatatttcttttggttttcctgtattgaaatatgtagccgagttgtctgaaaaacctttggatgtacatttgatgattgttaatcctgagaaattcattaaagaagtgaaagatttgggaacaatgatgatgaatgtgcattatgaagcctgtgtacacttgcatagagtggtgcaacagataaaggatgccggaatgaaagcggctgtcacattgaatccttctactcctgtagctatgttggccgatattatccgtgacgtggatatggtgttgctgatgagtgtgaatcccggttttggtggtcagaaatttattgtacataccctggataaggtgagggaattacgtgaattgataacgaatacaggttcgcaggcattgatagaggttgacgggggagtgaacctggaaaccggcagacagcttgtagaggctggagcggacgtgctggtggcaggaaatgctgtgttcaaagctcctgatatgtcagacatgatacatcggttgaaatctctttgagcttaaaaccaaagtgcgaaatatagcggctgtaaagccttgttccatgttccggttgactatacctctagtcgccggaatttttgtatccgatcatttttttcaaggcgccttgcctgtgcttgtttctggcacgggaatattggggtgcttgattggcttgattgtattgatgaaatggcaaggctacctttcccgatggttatttggaggcatggtttttatgtttctattttgtgtaggggcattgttgctacagcaaaaatggcaacgggtggactatgaatggtcatcagggaagaatatgtatcaaggggtgatagtggatgttccgcaagaaaaggccaaaacatatctctgtaaattgcggatagataaagaaatgtctgagagggggatggttcctgttaatcgtatgatactagtctatattatgaaagatagtctttctgtaaatttacgatgtggagaccatttgaacttttatacacgtatctctactcctgaaagagaggtgattccgggagaatttgattatgcggcttatcttttcagacagcaaattagcggaacggccgtaatctttccggggtattggcaatggacaggcaagaaatcggcattgacatggaaacagcgggcaggtgtatggagagagaaaatactggacagttatcggaagtggggattctcgggagatgaatttgccgtattgtcggctttgactgttggctataaagaggaactgagtgaggatttacgtgaaacttatcaagtggcgggagtgagccatatcttggctttgtcaggaatgcatatagctgttttgtggggattattgtgttggatattgcgtccgctggatagaagttgcctgctgcgatgggtaaagtgtggcattattgtgttgttgttatggacatttgcttttttagtgggcttgcctccctcggttatacgggcggtggtgatgtgtatgttaatgacagcggcgcgtgcggcaggagaacggactttgtcattgaataccttgtctgtagcggcattctttatgctgctttacaatcctttttatctttttgataccgggttccagttgtcatttctggctgtactttcaattttgtttatttatcctgtcatttcccggtattggcgggtgcgtcaccctgtacctcgttatatttgggggatagtggcagtttcgctggcggcacagttagggacagctcccgtggttatttataaattcgcttattttcctgtttattttttaccggccaatctgatagtggcacctttagtgcttgttataatttatggaacggtagcaagttttgtcttgtctccttttacggtattgcatatatgggtggtaaaaggattgaacggggtgttgcggttgctgaatgacagtatgcaatgggtgggggatttgcctgtatcacattccggcgatatacatttgtctttgcttcaggttggtattctttatgtattattgtttgtggtattatcttatctgttatctccttcacggaaatcgttgattactgttttgtgtggaatcaatctttttataggattttcaggttgtctatattatatgaaagaggagtcttttcagttaatcctggcccattcgcaagtaaaagtttcccctcaaaaagatgtttggcaacaggatagcatttatcattataaaggtatgaatatatgtgttttggtggataaccgctggcggagcagatcggttgatagtttgttggatattgattatatgtacttgtgtaaaggttttaaaggaaaaattgccccattacaaaaaatatttaaaataaggaaggtcatactggatgcttcgctcggtgggtatagattgaatttgttaaaggacgagtgtagaggtttgggattggattatattgatatgtctccgaaaggttcttaccgtattcttctgtgaataaagaattaatttgtaaatttgccatttcaaaagaaaaagattgaatatgttatcaaaagtaattgcacaggctaatatagaccatgccgaaaaatggtttgaaagagctgataaaatagttattgttacccatgtgtcaccggatggtgatgccattggctcctcgttaggattatggcatttcttggaatcacaggaaaagacggtgaatgtcattgttcccaatgcttttccggattttctgagatggatgccgggagccaaggatataatccggtacgataaatatactgaatttgccaataagctgctgaatgaggcggatgtgatctgctgtctggatttcaatgcattgtctcgtattgatgcgatggcggatgctgtggctcagtcgccggcacgcaaaatgatgattgaccatcaccttaatccggaagccttttgtagaatcattatttctcatcctgaaatatcttctacatcggaattggttttccggttgatatgccgtctggggtattttgaggatatcaccaaggaaggtgctgaatgtatttatacggggatgatgaccgatacaggtggctttacttataattctaatgaccgtgagatttatttcattatcagcgaactgctttcgaaaggcattgataaggatgagatttatcgtaaagtttataatacgtattctgaagggcgtttacgcctgatgggatatgtgctgtacgacaagatgcaagtatttcctcagttcaattcggcattggtttggctgacaaaagaggagcaaagtaaattccagtatgtaaaaggagatacggaagggtttgtgaatattccactttccataaagaatattattttctccgtattcttgcgtgaggatacggaaaagaatatgataaaggtatctctgcgttctgtaggtgctttcccttgtaataaagtggctgccgaattttttaatggaggtggtcatctgaatgcatccggtggggagttttatggaacaatggatgaagccatcgatctgtttaaacaggctttggtgaagtacgaggaactgcttctggcaaaaaaatagttattttagtataattgcatacaaacaatataaaagttaggggcttatttattaattttgcccgaaaataacagaacttagaatgaagaaattaggtatattgttcgcatctgtgtttcttttagggctggtcttccagtcttgcaataatggaaagacctatgctgaaatgaaagaagaagagagagaagctatcaaacgatttattgaacgggaagatatcaatgtgatcagctttgaacagttccaggaacaggattctacgaccaatgtggatgaaaaccagtttgtccttttctcggaaacaggtgtttatatgcagattgtggaagagggaaacggagagcgtttgaaagacggtcgttatgagattctggtccggtatgtggaggaacagattacttcggatggaatagattctttgtcttggaatacagactatgggaattctcgaatggtttatccggatgctatgatgctgacaaaaagtggaaaatctttttcagctacattcacctccggtataatgtatacagtttggggtacaccttatgtaccttcaggatggttgattccattcaattacataaaggtcggcagggagatttccggtcgttctaagatcagactgattgtacctcacagtgaaggacagtctgacgcttctgcttctgtctatccttgttactatgaaataacttatcaattagcacgatgacattaattaaatcaatatccggaattcgtggaaccattggtgggcacgtgggggaaggtttgaacccgctggatatagtgaaatttacatcagcttatgcaacgctgatacgtaaaacaaccacagtaaagagtaataaaattgtagtaggacgtgacgcacgtatctccggtgagatggtgaagaacgtggtatgcggtactttaatgggaatggggtttgatgtggtgaatatcggactggcatctacaccgactacagaactggctgtaaccatggaaggagcgtgcggtggcattattttgactgccagccacaatcccagacaatggaacgctttgaagttgctgaatgagcatggagaattcctgaataaggaagaaggaaatgaagtgctgcgtatagcagaagcggaagcgtttgagtttgccgatatagaccacatcggaagttatcgcgaagacaatacctacaatcagaaacatatagatagtgttttggctttgaaattggtagacgtggatgctatccgtaaggccaatttccgtgtagctatagattgcgttaattcagttggcggtattattcttcctgaattgttggaaaggttgggagtgaagcatgtagaaaagctttattgtgaagcaaccggtgattttcagcataacccggaacctttggaaaagaacctgggggacattatgggattgatggccaaaggcggttgtgacgtggctttcgttgtagacccggatgttgaccgtctggctatgatctgtgaggatggaaaaatgtatggcgaagaatatacattggtgaccgtggcagactatgtattgaaacatactcccggaaataccgtttctaacttgagttctacccgtgctttgcgcgatgtgacccgtaaatatggctgtgaatacaatgcttcggctgtaggggaagtgaatgtggttaccaagatgaaagcgactcatgctgtgattggaggtgaaggaaatggtggagtaatctatcctgaaagtcattacggacgtgatgcattggtgggaattgctttattcctgagccatttggcgcatgaagggaagaaagtcagtgaactgcgtgctacttatcctccttatttcattgccaagaatcgcattgatctgactccggaaacggatgtggacgctattctggccaaggtgaaggaactgtataaggatgaagagataaacgacatagacggtgtgaaaatagatttcccggacaagtgggtacatttgcgtaagagtaataccgaacctattatccgtgtgtattctgaggctgcaaccatggaggcggcagatgaaataggccagaagataatggatgtggtttatagcctggcgaaataaatacattattaatagataattagccgtattgaatgagattatatttcgtttgatacggcattgttttttaatcagatagaaataaataacgtgagttcgaaataaaatcaaaaaatagcaagttgtccgtcattgacaaactttacgtcaatggcgggcttcttttcaaaaaagcagtatgccgcgatagccgacaaggagttggctataaagttactgaatgaacgatgtcttgagtgttcaatctgtgcgatgttcttcagttcgtcattgaccgtttcaatcaaggctctttttcttagcaaaatcttgtcggcaatactcatcagtgagttcctcatattatttttaactttagtaacaagttgtatgccattaaggaaaaggttttcaaacagagcctgacctatatatcccttgtctgcacatagttttcctttgatgttttccagaaacctaccctgtttcaacggttcccggtcatccacgtttccaggcgtgaacatgaaattgaggatttcacccttgtcattgattatcagatgcagcttgaatccgaagaaccatcccatagaacatcttccacgctcggcaagcccttcaaatgtcttatgaatcaagattctttggttacgacatacacataagggagtggaatcaacgaaactgatgccggtacaagttcccagcagtactcttttgatgaatatggtcatgggaagcaatacttccttctccagttccacaaaacggttataagaaacctgacgaggaaaaaggtgtttcagatgtttacagacatactccttgtagtaatgcttgaaacaacggaaaccaccggagtgaaacaggattagaataaccataatctctgcatcactcatacggttgggtttgttacgatgcatggtcttcatatccttaatcatatatttttcctgttgcaatgtaaattccttgcaaaaatcatcggccatacaataaatctctgtaactttagactctggaaacatagtggtaatcgtttaaatgttataattcagcactataaatttaatacttttatcgctatgtttctaattataagtgaaatatatttattcttatttcgaactcacgttaaatactatgagaaaaagccttttatttgtttgggcctgcatggggctggtttgtttgatgagtgcttgtaagacatcggttaaaagtaaagaatggaagctggtatgggtggaggactttgatcaaaaaaacagttttgacgaatcggtatggactaagatacctcgcggaacatccgattggaacaactatatgtcttattatgattcatgttatgctatgcaggatgggaatctgatacttcgtggaatagccaatcatactcagaaaaatgatacggctccttatctgaccggtggtgtatataccaaaggaaagaaactgtttacgggcggaagagtagaagtatgtgccagattgcaagccgctaagggggcatggccggctatatggatgcttcccgaaaaagcggagtggcccaaaggaggagagattgatattatggaacggttgaaccatgatcgtattgcttatcagactactcattcatattatacgcatatattaggtataaaggataatccgcctcacggaggcatcaataagataaatcctgaggaatacaatatctattcggtagatatttatccggatagtctggtgtttgctgtcaatcatcgtcatacctatacttatccgcgcattgatacggacaaggaagggcagttccctttctatcaaccttactatttattgatagatatgcagttgggtggctcatgggttggtgctgtggatccgaaagagttgcctgtggaaatgtgggtggactgggtgaagtattacgagaaacgctgaatgctgtttgtcgggaaacggggggctgttcaatgttgggcagccccccgttctgtttaattatcaggtaaatagaccttgatgtaacatcatcaaagaaaaatgttacaggcggagcacgtctgttctgcctgtaaagatgcgtgtatcattgtgattacaggaatcataaagctttgtgtacttttgtttcgtctggaataagattctaaagattggagcagggacaacattttgtttagctcatttttgttttcaataggcgtaaagtaattctagccaatggatggaattactttttatggaagatattttaatgtaataaccatgaatacacaaagtcaaaaagtttcgatggccgagaaaatcggttacagcctgggggattgctcggctaatctggtcttccagatgatgatgatttatcagacaaagttttatacggacatattcggtctggaaggtgccattgccggtacggtgatgttggtggcgcgtatcacggatgcctttgtcgatcctacagtgggattattgagtgaccgcaccaagacacgtttcgggaaatatcgtccgtgggtgctttggactgcgttgcctttcatggttttctatgtgttggctttctataatccgggcattgaagataaagggctggtagcattgtatgctacgttgtcttataccttgctgatgagcctttattcttttaacaatacgccgtatgcttctttgggcggagtgatgtccggtgatataaaggaacgtaccagtatcacttccattcgttttgtggcggctaccattgcccagtttgtggtgcagggacttacgctccctttggtaagcaagttttcggatggtggagacaaagcgcatggctggttatgtactatctctttgttcgcttgtatcgggttcgtttttctggtcattactttcttttcaactcgtgagcgcatagagccgcctgccagtcaaaagacagatacgcttcaggatataaaggatgtatttggaagtgctccttggcgggctatgttcatacttacgcttttcatttttattacgcttgccatgtggggtagtgccatgaactattattttgagaattatgtggatgccggagcattgtatgcctttcttgaccgtctgggattagtggcaatggaaacagatggcagcgcggggtatgctgtgttgaatgctttcgggctggtagtcaattcttccgataaggcatacgaggtaggatttggagtatttaatatgttgggagcacttgtccagttctttggggtgattttcttgtccggctttttggcaaaccgttatggtaagaaacgcgtttttattgtttgcctctcacttactgccatttttacagctttgttctattttccgggaaaagcggatgtggaaacgatgtttgtattgaatttcctgaagagtctggcatacgcgccgactgtacctttgttgtgggcgatgattgccgatgtagccgactattcagaatataaaaattaccgtcgcgccacaggttttgtgtttgctggtgtagtttttgccttgaaggccgggctgggtatcggtggggccatcctagggtttctgctttcaggatttgggtatgtgtccggtatcggggcagagcaaagcggtacggctataagggggattgtactttcctccagtctgattccggctatgatatttggaatgggagtagctgccttatgcttctatcctattacaaaaaaatacaacgaacagatgcaggcggaacttgctgaccgtcgcagtaaggccggttattaatgaaaaagaacaagttatttaccttaaaaactttgtaatatgaactataatataaaaactgaatacggttaacgataattagcataatcatgcaagttatcgtgcatgaaaagctcgtcggggctgtgtgctcagtcccttgccgcatggcgttccctccgcaggagctgttatggcttttcggatttgaatccatcgacatagggtttcccttgcgtgacgacagcgaaggcttgcctcacaagtttgttggcgaccgcaataaccaccaccttgccgggcttgccgttagatctgagacggtcgaaacatgccttacactcggtattgcacctgagcgatgagaatgcggctacataaagttggcttctgaggcttgaatccccgtttcggttgatgtggcctttgacattgactgacgtaccggattgttggtaagtaggtgacaagcccaagtagcgggtcagttgcttggcattatcaaagtaagagaatctgccggtggctacaataagcggagctgccagcgtgacaccgatgcctttgatggaggtgagcaggtccatctgtttcttgtattcaccttgtgccaatgaagcgagttcctcttccatctctttgatttgcttttcaagaaatgtaatcgtcttttcgatggttttcttgcatttggggtcaaagaatggaaggacctccatcgagcctttgaggttgcgtgtggctacaagttgcttcttgagttggcgcagcaccgtccgtttctgcttgaggacaaggattgcatcactgcgaagtttgtatggcgcaggttgcatcttctctccgtaaagtgctatcaggcgtgcatcaatctcatccgttttggtaacggtgagcatgacacgggcgaagttctttatcttcaacggattttcaaggctgatggtaatgcctgcctctgaaagcaggtaaacgagtaacgcgctgtaattgcccgtagcttccagcacgcaattatgttcggatgctgaaatagtttggacgaactcgtgaacgccatttacggtattcttgaatgttctcgtcttgtttgtctttacagacgaataggcaacaacgaaagtcaccttgctgacatcaataccaacgtaagtcatagtctgaatgatttattaaaacaacatctgtacatcgtgagccatcattgcgaatgcggggtctcaaaagcccattgaactatccggtttctgatgtataaagtgtggggtaaaacatactacacggtctttttgactaatgaaaactcagccttattccacactttgatgttgaatgtttatgcaaaaatataataattaaaaattatacaatgaaaataagatatgtgacattattggctgccattgccggattaatggccgcttgcggcaatgaccggaaggtcgagccgggtccttcgctgaaggaagcagcttcgggcaagtttctgatgggggtagcgttgaatgtacgtcaggcagcaggtcaggatacttacgcctcgaaagtggtaaaacgtcattttaattccattgtggccgagaattgcatgaaatgcgaagtgattcatccggaggaagaccgttttgattttacggaagcggaccggttggttcgttttggcgaggagaacgatatggctgttatcgggcattgccttatctggcattcacagctggcaccttggttctgtgtggacgaacaaggaaaaacagtaagtgccgacatcttgaaggagcgtataaaaaaacatatccagactattgtgacgcactataaagggcgtataaagggctgggatgtattgaatgaagccattgaatcggacggctcctggcgtaaatctcctttttacgagatattaggcgaagagtacatcccgcttatttttcagtatgctcatgaagcggatccggaagccgaactttactataatgattatggcatggacgggaaggctaagcgtgacaaagtagtcgaattggtaaagatgctgaaagaccgtggactgcgcatcgacgcggtaggtatgcagggacacatgggaatggattatccgtcagtgtccgaatttgaagccagtatactggcatttgcagctaccggagtaaaggtgatggtaaccgaatgggatatgagtgcattgcccacggcacggatgggagccaatatttcggatacggtgtcttataaacaatccttgaatccctatcccgacggtttgcccgactctgtgtctgtggcatggaataaccggatgaaggaatttttcggtcttttcctgaaacattcggatatcattacccgtgtgacagtgtggggggtgacggacggtgactcatggaagaataatttccctgtgcccggacgtgtggattaccctttattgttcgaccgtgattgccagccgaaaccttttgtggaagaactgataggaaaacataacatttaataacgtaacgatatggaaaagaaattcagatacttggtgcccggagactatatggcagatcctgctgtacatgtttttgacggaaagctttacatttatccttctcatgatcgcgagagcggagtggaggagaatgacaatggtgatcattttgacatgtgtgactatcatgtcttttctacagaagatgtgatgaacggaacagtgactaatcacggagtcgtactgaaagtttcggatgtcccttgggccgggcgtcagttgtgggattgtgatgtggcctgtaaaaacgggaactattatatgtattttccattgaaagaccggaacgacatcttccgtatcggcgtggcggtgagcgattgccccgaagggccgttcattccccagcccgatcccatgcgtggaagctacagtatagatccggcggtatttgatgatggtaatgggaactattatatgtatttcggcggtttatggggtggacagcttcagcgttatcgcaacaacaaggcattggagtgggcggcttttccggctgatggtgaaccggctttgccttcacgtgtggtaaaactttcggacgatatgcttcagtttgccgaagagccgcggcctttggttattctggatgaacacggacatccgttgagtgccggtgacaatgcgcgtcgctttttcgaggcttcatggatgcacaagtacaacgggaaatattatttttcttattctacgggagacactcatctgctttgctatgccacaggagataatccgtatggtccgttcacttatcaaggggttattttgcagcctgtggtaggttggactactcatcatgccattgtagaatacaaaggaaaatggtatctgtttcatcacgattgtgtcccttcggggggaaccacttggttgcgtagcctaaaggtatgcgaattggagtatgatgcggaagggaaaataaagaccatagaatctgtctgaaaataaatcagtgatacatcattcggacagattggaccggttactttgccgggcattgtccaaacagaccgtttgcagaaattatgttcattgtccggaacttgcaaacggtctgtttatatctgtgctcttcaaatataatgtctggtggtgtgaatgtaatttgttgtaatataatgtgttatgtgtgtattgtaacgcaagtaaagattcatgtaacacgtttgaagcaagatgtaactctacgaaagatgcgtgtatcatgcagagaatttatattcggcgacactttctatatttgcgtctgaaatccgtaaaggaattggtcaattataatactagaaagacaatgaaacaaaaacaaaagctgaaaagatggtcgggcgtgctgatcgctttaggggtgctgggctcctcttttacctcatgtagttcgatcaagaaaggaaatgatttgccagttgtaggaaagtctgtcgctcttttcgattactttaattataaaggtgaggatgatgtctatatttccaatccgcttccgggagatgattatttttataatcccattctgccgggatggtattccgatcccagcatttgcaccaatggtgaaggtgattattttctggctgtttccacctttacttattatccgggtgtgcctcttttccacagcaaggacttggtgaactggaagcaggtggggcatatcttgaatcgtccttctcaattagtcaacatggaggggcaacacgtaagtggagggatttttgccccggccatatcctacaacccgcataacaagacttattatatggttactaccaatgtaggggttggaaacttctttgtgaagacacaagatccttttggcgaatggtctgatcctattatgttgcccgaagtgacaggcattgatccctctttctttttcgatgaagatgggaaggcctaccttgtcaataatgatgacgcgccggacaacaagcctgaatacagcggacatcgtaccatccgtgtgcaggaatttgatgtgaatgcggacaagacggtggggccgcgcaagattctggtgaacaagggagctcgtccggaggacaagcccatctggattgaaggtccgcacctttataaaataaacgggaactacttcttgatgtctgccgagggtggaacagccggatggcattcggaagtgattttccgtggtgattctccgacgggcaaattcacaccgtggaagaacaaccctattctgacccagcgtcagttggatgcggagcgtcctaatccggtgacgtgcgctggacatgccgacttggttcaaacccgggaaggggattggtgggcagtctttctggcttgccgtcccataaacaacacgttcgagaatttaggacgtgagacttttatgatgcccgttaagtggagtgaggatggtttcccctatatgacgcagggggatgatctggtgccagtcattgttcgccgcgaaggagtgaagcgtgacgaatctgccaccttcggaaactttgaaatgaatgacggtttcgacggacaaacattgggtatggaatggatgactttgcgtgctcctgctaccggactttactcgctttcccagactccgggttatctcactttgaaatgtgattcagtcagtgcttccgaaaagaaggtgccggcttttatatgccgccggttgcagcatcataagttcgaatgcagcacacgtatgttgttctgtccgcagagcaaggcggagcaagcgggcatattgttgttcaaggacgaaaagcatcaatatttcctagctgtaggcagggatgatcaaggtgaatgtatttccctcaggcagataggcgatggggaaagtaaggtgctggcttccgttcgcttggacgacggaggagtgcttaccgacctgaaggtggtttcgcgcggaacacattatgatttctactatgctcgccaggaaggtgtgtggtacgtgttgtgcaggaatgtggacgctgggtatctgtcaacggccactgccggaggctttactggaacaacgataggcatgtatgctaccttaaaataaatgactgtttgattttttgtataacttaaattaatgtattaatgaaaaatgctatgaattttaggccggtggggctgatgcttctattctgtctcattcctttgtgggcatttgcacagagcgtgatggtaaaaggtgtagtaaaggacacaagtggtgaagccatcatcggagccagtgtcttggaaaaaggcactaccaacggtacgattaccgattttgatggtaactttgcattgaatgtatcgaaaaacgccgtgttggtggtgagttttgtcggttacaagaacgaggaaatctcggtagcgggaaaaagttctttaaagattacattgaaggaagattccaaagctttggaagaagtggtggtgattggttacggtagcgcccgcaagagtgatgtgaccggatctattgcatcggtaggcggagagaagctgcgtgagatgcctgccaccaatattacatacgctttgcagaaccgcgtggcaggtgtggatatgtcgcagacttcttccgcaccgggtgcttccatgcagatccgtatccgtggtacccgttcgttgaacgccagtaacgacccgttggtggtattggacggaatcccctttatgggtaatttgtccgatatcaaccccggtgacatcaagagcatggatattttgaaggatgcatcctctactgctatctacggttcgcgtggtgccaatggtgttatcctgatcactacacacaaaggggcacagggtagtcccgcccggtttacttacaatgggtatgcaggtatgaagaaggtattttccaaatatcccatgatgaacggtagcaagtttgccgaaatgcgtaaactagcaggcaagttcgagaattcggtggacgagtcggacgatgtggatactgactggcaggacttgatgttacgagacggttatgtaaacagccacgatgtcagcgtgtccggtggtaccaacggtggaggctatagctttggcgcggcttactataaggatcaaggtgtcattcctactcagaactatacccgttactctctgcgtggttctttcgatcagggtgtgggaaaatatttccgcttcggactggtgaacaataccaactataacgtcaccaaaggttccaatatcggactgtatggtgtactttccatgtctcctatcgccgacccctataatgcggacggcacattgaaacgtaccgtgaaatacaacagtcaggatgagtcatttgtactgaccagaggcgttgtggaagaattggaagacagttggctgagcaagaccgaaggcttcggtacgtacaataacctgtttgccgaagtgaaatgcccgtggatggaaggtttgaaataccgtgtcaacctgggtttgaactatcgttctactaaaggtggatcgttcactggcgaaggcatcaacagcactacggcagacactccgtccaccgcttcgctgaaccactcggaaacgactaattggactgtggagaacctgctgacttacgaccgtacttttggaaagcaccagctgaatgttgtcggtatgtactctgccgaacagactgtctatacacgttcggacgttgccggacgggatattcctgccgaatatttccagttctataacatcgggcgtgcggaaggcaccattacggtgaaccccgacaactggaactatcagaagagcggtctgatgtcttggatgggtcgtgtgatgtacacttacgacaatcgctatatgttgatggcgactgtacgtgccgacgcttcttcacgtttggcaaagggacaccaatggcacacttatcccgccgtatcggcaggatggaacattcgtcaggaagagtttatggacgaggtggactggatagatatcctgaaactgcgtgtaggttacggacagacctccaaccaggctgttgatccttataagacctggggacgcttggcaacccgtccttataacttcggtcctactggctatgtcaccggttactatgtatccgaactgcctaatgccgaattgggttgggaatactcttctacatggaacttcggtctggacttcaccttgctaagaggacgcctgtccggtacatttgagtattacattcagaaaaccaccgacttgctgcaaagcgtaagccttccttccacttcgggagtaagcagctatatggctaatgtgggaaagacggaaaataaaggttttgaatttaccttgaacggaacgattctggacaaccataacggatggacatgggaggcaagcctcaacctgtctgccaaccgtaacaaacttaccgaactggcttcgggttccaaagatgataaagcgaacaactggtttgtaggacatcccatcgactgtatctacgactatgaaaaagtaggcttatggaacagtgatgatcccgatttccaatacttggacattctggagccgggtggcaatgaaggtatgatcaaagtgaaatataccggtgatcgtgatgccagcggcaagccgacccgcgccattggtcccgaagaccgtcagattatcagcttggaacctaaattccaaggaggtttcagcactcgcgtggcctataaaggctttgacttgaacgttatcaccgccttccgttgcggaggcaagctgatcagtacactgcaccacagcaacggttacctgaatatgctgaccggtcgtcgcggacaagtggatgtagactactggacaccggagaacaagggggccaagtacccgaaaccgggtggtatccagagtggtgacaatccgaaatacggaagcacattgggctattttgactcttcttactggaaagtacgcaacattacgctgggctacaacttcgagaagcaggcttggctgacccgcatgggcatacagagcctgcgtgcttacctgtccgtgcagaatccgttcattatctgttctcctttccataaagaaaccggactggatcccgaaaccaactcttacggtaacgagaatgtagctgtgacagaaggtattcagaaacgattcctgacagtaggtactaactcaccgtccacccgtaactatttattcggtattaacttaacattctaaatgaaagcatgactatgaaacctatattttcaaaaataagagttttgggaacagccgcactggctttgttcctgacagcatcctgttcagacattctggacgagcagccgcgcagcagttatgatcctactttctttaagacagaaaagggagtggaaggcggtgtgacctctatgtatgcacacttgcgctatatttacggacaagcttattattataattcctgtctgacgggaaccgacgaggcaacctggggatggagtgccgatggtaacttcaaggatgccgacctgtccggagtaggcaacctgactgccacgacttgccgttccgacgccttgtggggaaccgctttctcgaacatcaacaccgctaacggagtgatagagaacggtgccgaagtaggagtcaatgaatcattggtttccgaagcccgcttcttccgtgcgttcgattatttcctgttggtgcagaccttcggcggagtgcctctggacctaggttccggcgaactgaagttcaatatcactccttcacgtacctccgtgcgcaataccgtgcccgaagtgtacaccaaggccatcttccccgacttgctgaccgctatcgagaacttgcccgctaatcctcgtgtgacgggtggagtgaccaagaccgttgcccgcctgtacttggcaaaggcttatctgacttatgcctggtggctgaagaatccgaataacattcctacttatcccgagtgccagcgtacggaccccgacggacacgatgcggcatggtacttccagcaggcatacgatgtggcggttactgctatcgagaaccccggtcctttcggcttgcaggaaagcttctggatggtgaatgccggacccaatgaccgtaacatggaaatcctgctctatgcagaccatacgcaggaagacgagtattataatggtggcagcctgagctacggtggcggtggtgctcccgataactttgccggatggatgatgaactggaactataccgacgcgcgttcggctgataatcaggctgtcatcaaccgtattgccgagcagtgttatggccgcccttggacccgtatggctcctccgttgggtgtgtttaccaagacgtttgccgacaaggtgaacgactcccgttacgacggtacttttactactgtttatcgcggcaactggtctacagccggacagaactgggaatcggtgaccaatgccaacggaatgaaagtgaaagaacgtgaacctatattctctttcgtattccaggatatggataagatagactatgcaggagaaggttctaaaagcaatctgggagcaggtacgttgcccggtcgtcccgactgggtattgggactggatgcggtaggccgttatgtatatcccggtctttggaaactcggcccgtatcgtacagacaacggctccggagcaggacagcccaatgcgggaagtacccgtccgtataacatcgccaaattctccgaactttatctggttgctgccgaagctgccgtagaaggagctgccacacaagccggcaagtctgtccgtgacctggtgaacgtgcttcgtgcccgtgccggtcgctggacttacagcaatgccgagtacaaggaagtggatcgtgatttcagtgctgaaatgacagccgccactccggcaaccattgacatcaactatattctggatgaacgcagccgcgagttttatggcgaaggttatcgttggttcgacttggttcgtactcagaaatggaacgaatatgctgacagttacgtgatttgtggaggcaagggtgatcacaatccgcagacttacagccgtaccatcgaagcgttccattatctccgtcctatcccacaaggacagttggatggcatggaaatgacagaggaggaaaaagacgcttatcagaatccgggatacagagattgattttttgttttttaagagtacccgccgtttctttctgtttctgatggaagaagcggcggtctttttatggtatggactgctgggtaggttatcatcttcccatagaatatatgttttcagtttgatgagtatgtggcttccttctgataaatttactgtttcacttaggtgggtaagttttatcactgtaagcattcggcctcgtgcgtgtttttttcccctcttttccttcctacctttgtggcttcattataatcttaatccattatgtgttcagtattagaattttctagcgaaagtgataaactacgtactctcttttccgagtctaaccattttgattctgttcttttcatatttgatggcggccgtcgttataaagtttcgtcttccagccttggtatccattcccctcaggacctacttctccctttaggtcttggccttttccgcagcagtcctttttggtcttattacctttatccccaaggttgtaatttccataaaggtattgacggtctttgtggcgaggtcatccgacacacgggttcctgcgtgtcagagcagagctgtcatatttttcccgaccgctcccgtagcaggttgcatatcctttatcggtgcgacgacgaataccgtctggaatgccgtcgtctgaatcgcggttctttcctcttgaaaaaggaggaacggaagaaggattttcttcaaatttcctggaatcgcctgaatgagctgcttactgttaaaaagtatcggaaaacagttgaaaagtaattccccattctataagccgtgcagttttattttgataactttgccacataataaaaagtggatgtacagtgaaagaaccggttattacccttactttggaagagtacgaagagttgcgcaaggaacatgaatgccttgaaaaggagcatgcggaacttcagagaaaatacgaagcctctttgcaggagtattcccgccaggtcgaagaaatctcggcctgtacagccgtcattgccgatctgagatggaaattggctgacttgacacgccgtttatggggtaaatccagtgaaaaacgtcatcttcccgaagatgccggccagctgagcatctgtttcgagtctccgtccgatgtcaatgacccggtagcggaagaacagaaaaccgctgggaaatccgtcacatcggagaatggctacaatcgtttccgtaaaagcttcacgaaaaagatcactccccacgcccgtaagcccatcgacccgtcccttccccgtgaggagattatcattcccatgccggaaggcctttcgttggagggagcgacgaagctgggagaggaagtgagcgaacagtatgctgtcagtcccgcccgattctatgtgaaacgcatcatccgtcctaaataccggctcgccgacggtcgtatcataaccgctcccatgcccgtaatggcacatccccacagcaatgcctcggaaagtgtactggcccacattgctaccgccaaatattacgaccacctgcctctgcacagacagctggatatctttgagcgtgaaggaatccatctgagtccttccaccgtaagtaactggatgatggctgccgcacagcgtctggaaccaatctataatgaacttcgtgaactggtcaaggacagctattacgtcatggccgatgagacaccccatcccgtacttgaaagcgaccggcccggtgctcttcaccgcgggtatatgtggaacttctatctgccccggttccatacccccttctttgaatatcacaagggccgtggcagcagcggaatagacacactgctggcaggacaggtccgggtggtacagagtgacggctttgcagtatatgacaagttcgacacgctacccggaaagttgcatctgtgctgctgggcgcacgtcaggcgcaactttgtggaagcggaaggaaatgaccctcccagagcaaggcatgcacttggacaaataggcggactgtatgccgtggaggagaaaatcagaatggaacatctggaaggggaggcggtggtaaagcttcgccgggaaaaatcgtaccctattatcaaagaactggaaaaatggtgcaaggaggaatatggacatacggtcgataaatcgcctattgccaaggccatgttctatatgtacacacgctttgaacaactgtccggatatgtcaatgacgcacagttctgcattgacaataatccggtggagcgttctataaggccgttgactttaaacagaaaaaatacgctcttctccggatcacatgaggcagcacatgcagcggcaattttcttttcactgatgggatgctgtagggaaaataaggtgaacccaaaactatggatgcaggacgtgctgattagggtacaggagaaagaaagagaagagaaaaacgattacaccgatttactgccatttaattggaaaggataaacaggaaagctataataaagtcaaaagccagacatgcttcgtctggcttttgactttattataacttggagagaaacacgcacgaggccgaatgcttacagaggaattagggtattcatcaggctggtaaaggatacttgtacagcttgttgctgcttgtagtttgcgattggtggatatggggtctgtctgttcctgtcggatatgttttgaagtaaggaaagagcttgggaaatatttttccatcggctgaaaggactgatagcagactgaaaggactactgtcagccttatgcattgtgtaatagtgagttatgccgactgaatggactgaagaaaggttcgtgaaataggtatatgtaagagtgttttgtaggaaaagtgtatttgttcataccattgtatccgcaaagtttgcattcggcggaaactgggtctgtacttggtggaaaagagaaccggaaattattttcagttctcttccttattcttatcctgtttcaaatgctgttccatgtacatgctgggaggcattccgtacagatccttgaaagcggtcgagaaattgttgggattggtgaatccggtcaagtccgccacttcggctatggtgtaccgtttcttcgacaacagttctgccgcttgtttcagtcggatgttccggataaaatcccgtgtggtctggttggtcagttctttcagtttacggtgcaagtgcacgcggctaatgcctacctcggtggtaatcatctccacggtgaggttcgggttgctcaggttttcgttgatgacccgcatgattcgttccatcagtttgtcatcgggggactgtacttctattggttgtaccttatccccttgggtctgttgtccggtataggtattgcgtagtcgttcacgactgcggatcaggttggcggtcgttttcctcaatatctctatatggaaaggtttggtcatgtaggcgtcggctcctgtttccagaccttccagattgtcttcctcccgtgtcttggcagtgagcagtattaccgggatgtggttcaggttcacattttgctttattttgcggcataaggtaagtccgtccatttcgggcatcatgacatcacttattaccaagtccggggttttattgaagatgctttccagtgcctccttgccgttgcagctttccagggtatggtaatcgcttgccagttcacggcagatatagcggcgtatatcttcatcgtcttctaccaccagtactttgtatttcgttttggttcgtgtttttccgttttcttcttcctcggtttcataaggaacagggaggaccggagccggagtgtggaagagaggagctttgtcggcttccatttcttctttgcgcagatgggcgcatcccagaggcatacggatgataaagctgcatcccggttgtccgtccggattattttctacacggatgtctccatgatgaagttccaccagtgagcgggtgaggtgcagcccgataccggtgcctatgtttgagttgttttggctattccgtatctggtaaaagcgttcgaatatgtgttctgtttctttgggggcgattcctattccgctgtcggtcacggtgatttcggcatactgttgcaatggtttcggcagggtggagtccttaccggtgcgtagccgtatgtccacactgcctccttcgggggtgaatttgaaggcattggacaggatgttcaggataattttgtcgaagttcaccgggtccacccacaattttaagtggtcggcgccctcgtggtggaactgcaaagtaatttgttttttgttcgcttgttctgtaaaggtttcacacaaatcattaatgaatccggtcatttcggtttcacggaaaacgagtgacatctgtcctttgtctatcttgcgtatatccatcaattggtttaccagccgcaggattctttcggaattgcgccagatgatgcggtagttcttttgccgttcgtggtctgtatcgtttgtcatcagtttttgcaaaggactgatgatgagtgacatcggagtacgtatttcgtgggagatgttgatgaaaaactgtagcttggcttcgtttatctgttcggcatggatatgttgcatcatttcctgtcttatgcggtaacggtgtctcatttgcaggatgatgccatagacggctgctactgccaataaggcatagatcagcatggcccagcccgatgcccaccatgccggtgcgatgtgaatggtgatttcatcggtgtcggattccagcagataatcttcggctttgatccggaaatgataatcgccggggggaaggtcgctgaatgacactcggttgactcctttgggaagtttgacccagggggtgttgtttatggtatatagatacgtgatacgttcggaattatttagttcgcgggtagagaactcgatgctgaaagtgttgtcgttatgtgacaagtggaaatcccgggcctcaaagacggaggtgtttatgatttcttttccgcccgacaacattcctttccttatgggttggtcgtgcagatagaagtcgatgatgcgtacgttccatttttttgcgggattcgtaatctcttgaggattgaaataggtaattccgtttgtacctccaaaccagagtatgccgttgtggtcggcaaaagaggcgtttttgctgaattcatttccttgcagaccgtcgtctgcatagaaattgctgaacgtgtgggtattcagattaaaacgtgacattccggcattggtgcttatccataagttgtcctgcccgtctcctttgatagcatatacggcgttactggatagtccgtgggcggtggtgtaggtctttagttgctgggtttggggattccattctgccagtccttcggaattgcctatccagatgttgccttgggggtcttcataaagggagtggatgatgtgtctggataggatttcttcagtcttgaagtcgtcggtgctcaggtctatacatcttattccgtcatacgttcctacataaaggtggttgtcaccggcgtacaaaagacagcttatccatttatattttttggtggcagcattgaatttagggtcatatacagactgtcctgtcttcaagtcataatagaaaagtccggctcccatggtggctatccagagtcgtttgtcctggtcttcaaccagatcatacacgcgttggatacggtttccattcttgtctgtcagattctgcagatagctgcactgtcctgttttcttatccagtctgcctagtccgttggtataggatccgaaccacagattatgttcagagtcttcatacaggccgaaaacggtggaaggaaccgaagaggggctgtcatgtggggcataatggactttttgcttcagttctgtggtgatgccgtatatgccgtcgttgtcagtacctatccataatatgcctttgtggtcgcggcagagtgaggtgatacagttggagccgatgatattcttgtttattgatttgtagcctatgtacttgaaactgttgggctgtgcgggaatcatcataacccctttctggtaaatggctatccataggtttcctgcattgtctttcaggacggagtgtactttggaggtaccggagtcgaggtaattattatcaaaagggtaatccgtgatgagctgtttggggatgttgaaaatcttggtgcctttcccgtccgtgcccaggcaaagctcgttttggcttatctggcagatggatttgataggcaggttttgttttcctttataaaggataggaatgaactcttctgctggttggttatatttcagcaatcctttgcctatggttgccaggtagatgtctccgtagttgtcttcatagaggtccacaatggtcattcccttctcttgtttcagaaagtgcttgcttttattgtccacagagaggcggtagataccattctcaccctgtgttacccaaagattgtgttgtctgtcctctatcatgtagtctgtcatttgggtggggataggtaagtccagtttgtgtgcagtcagtttcccctgtgtgatggttatggtacacaagttgtttcccgatacccatatttctccgttcctacgttccagaatggacatgatattgctgtcaaaagtctttccgtcttcccattgcgctcgcgcgctgaagctgtcggtttccggatcgtatagctgtataccgttataggttcctacgaacaaccgtcctttgctgtcctcgtacagcactcgtacgtagttatggcagagggagtactcgttttccgggtcatgcttgtaggtgatgaacttggctccgtcatagcggttcagtccgtcttcggtggcaatccatatcatgccgttccggtcctgatatattttgttgatcagactgctggaaagttccctgtctgttgtgaagaatttgtacgattgtccgtggcacaacaaagacagaaaaagaaatagtataagaatcgtatgtttcatcataatataaatatcccagtaaattcaggtgcacaaaaataattcaaaaaagaatatatagcctaataaataaggagtaatttcggtactttgtgccatatcgggcaggtttgtaacatggaaaaaggactatgtaacatggttacactccgatataaggcgaatgtccttacctttgctcttgttgagcagtgaagaacggaacgtaaaaacagccttgtgaatttaataccatgaatatgaaacttgaatgtgatttatccggtatccggaaatgtatgatgagtggcttgtccctgttgcttgccggagtgttgcaggcgcagaatccgattgtgcagacttgctatacttctgatccggcacctatggtgcacgatggcaccttgtatgtttacacgggacacgatgaggaccatgccgattttttctggatgcaagagtggcgcgtctattctactaaagatatggtgaactggaccgatcacggttctccgcttgccatcgagtctttcgactgggcggacgatcgtgcctgggcatcgcaatgtatcgaacgcaacgggaaattctattggtatgtgtgtctgcattccaagttgacaaacacgatggctatcggtgtggcggtgggtgattcgcctaccggcccttttaaggatgctatcggcagaccgctttacgaaggtagctgggattttattgatcccacggtttttgtggacgatgacgggcaggcttatttatattggggaaatccgaatgtttactatgccaagctgaatgccgatatggtttcgctggatggtgaggtgtccaaggtggagcagactatagagagttttggttctccggggccggacaaacgggagaaaggaaagaaatacaaggacatctatacggaaggtccgtggttgcacaagcgtggcggtacatattatctgtcgtatgcagccggcggagtacccgaacacatcgcttactcgatgagtgacactccgacaggaccttggaagtatatgggagaaattatgccgttgcaagataccggttcgtttaccaatcactgtggagtgacggattataaaggtaattcttatttcttttatcacaccgggaaattacccggtgggggtggtttcggacgtagcgtggcagtggagcagttcagttacaaccccgatggtactttcccgataattaatgcgacgacagaaggggtgtcgccggtaggcacactgactccttatcaacgtgtggaggcggaaacgatagctttctccgaaggagtaaagtcggaatggaatgcaaagacgggggtgtatgtatccggaattcatgacggggattatataaaggtacgcgaggtggattttgaagatttgttgcccaagtgtctttgtgtgtctgttgccagtgcccttcgcggcgggtggatagaaatcaggaccgacagcatcggcggaacgctgatagctgaaatgagggttcctcataccggaggatgggaatgttggacaagtatagaggcggatgtgacggttcctgtgacgggtgtgcatgatgtctattttgtgttcaaaggcaggaaaggatgtgaactgtttcattttgactggtggaaattcagccggcaggaaatgacagagcaagaggtgaaagacaggacgcaggccgcatctaccaatattccgggttacgagtatccgcggctggacgaggagcattgcgcccacttccgtttctatgctccgcaagccggaaggcttcaggtagactgttgcggtaagaagtatgacatgcagaaggacgcggatggcttttggacagtaaagaccgatccgttggtcgtaggattccattattattttttgatagcggacggggtgcaggtggccgatccgtccagttacactttctttggttgttgccgtatggcgagtgggatagaggttcccgagggagtggaaggtgattactatcgtcctcagcagggagtacctcatgggcaggtgcgctcgtgtacttattattcggaagccaaaaaggaattccgccgttgcatggtctatactccggctgaatacgaaaccaaggtgaaaaaacgttatccggtactttacctgcaacatggcatgggcgaggatgagacgggctggtcggcacagggatgtatgcaacatattatggataacctgatagcctccgggcaatgtgtgccgatgcttgttgtgatggacagtggggatgtggaagctcctttcattcctcgcaaagggaaggatgtgaatgaggagagagctttgtatggtgcctctttttacagggtgatgctggaggacttgataccgatgattgacaggacgttccggacttatactgatcgtgaacatcgtgcaatggcaggattgtcatggggtggtcatcagactttcactaccacattgcctcatctggacaagttttcgtatattggcgcattcagcggtgctatcttcggactggatgtgaagacttgctttgacggtgtgtttgctgatgccggcaagtttaacaagcaggtacattacttgtttttgggatgcggaacggaagaacggttcggtacccgaaaactggcagagtctttgcgcaaaataggtattcatgtggactattacgaatcgcagggcacggcacacgagtggttgacatggcgtcgttgcttgtaccggttcgtgcctcatttgttcaaaaatagaaagtagaaaaagaaatgaagaagatcattattattattacctgcttcattggtttgtcgggggcgtttgcacaacaacgggaaatgttccataatccggtgattgaggcggatgtacctgacccttccatgataagggtgggaaactattactatctggtaagcaccaccatgcacctgatgccgggttgtccggtgatgcgttcaaaggacttggtgcattgggaaacgatcagttatgtgtttcaacggcttactgacttgccccgttatgatttgaaggaaggcacggtatatggtcgcggacaatgggcctccagcatccgctatcatgacggacggttctatgtatggttctcacccaatgatgaacctcatcgtggttatatctataccgccgaagatccggcgggcgaatggacattagtctcccgtccgcctcatcatcatgatgcttctttgttttttgatgatgacggcaaagtctatctgttttatggcaccggacaacttcgtcagctcaagagcgacctgagcgatgtggagccgggaggtatagaccaaaagatattcgagcgggatgccgacgagcagggacttctggaaggaagtcaggcattcaagcataacggcagatattacgtgatgatgatttccatggactggagcattcccggacggttgcgtcgtgaggtgtgctatcgtgctgaccagataaccggtccgtatgagaaaaaggtgattttagaaaccgaatttcaaggatatggtggcgtgggacaaggctgtatagtcgatactcctgacggaaactggtatggctttatttttcaggataggggcggcatagggcgtgtgcccacattgatgccctgccgctgggaagacggttggccgatactgggtgatgcggacggacgtgtgcccgagtgtatggagatgcctgcttccggagaggagtgtaaaggaagtatcatgggaagtgatgatttcgacaccggccggttgagcttgaactggcagtggaaccataatccgttggacgattgctggtcgctgacagagcgtccgggtttcctgcggttgaggaccggaagggtggtggataatctgtttctggctcccaataccttgacccagcgtatgagcgggccgaaatgcagcggtgtggtagctatggatgtctcgaagatgaaagaaggggatgttgcgggcttcagtgcttttaatgggttgtccggagtgctggctgtggtcatggagaacgggaaaaagcagtgggtgatgtcacatcagtctgtcagtctttcggaccgggaaaaaagggtgactgctgtggaagtactggagaaggaacgcatagattgtgaaaaagaggtggtctatcttcgtatggagggcgactttgccgataaaaaagatgaagccactttttactacagttatgacaagaaaacgtggaaacgaataggggagccttgtaaaatggtttttgattataccaaattctttatgggaagcaagtttgctatttttaattatgctactaaagatttgggaggatatgtggatatagattattttgaatacggtaactaaaaagtgaatagaatgaaactaaaaaaatgcgtggggatattcttgttctccaccttgtgcctgaatgtaggagctatagatcataaagggattacttttgaccggctggctcccgaccgtttcactctgatggaaaacggagtggccaatgaaatattggtggacgagcaggaggatgccggtgtgatgatagcggtaaggaatcttcagaatgactttaaacgggtgagtggccggactgccgggttatgctatactcccggtgtaaagcgcatgattatggtaggtacgttgaaaagccgttatatccgggaattggtaaaggcgaaaaagatagatgcttcattgctggagggcaagaatgagaaatacctgatgactgtggtgtctgctcccttgaacggagtgaatgaggcgcttgtcattgcgggaagtgacaaacgcggaacgatttatgggatttatgagctttcggaacagattggtgtttcgccgtggtacgactgggtggatgtgccggtgatgccccggcagaatctttcgatgatgcgtggaagttatacggcgggagaaccggcggtaaagtatcggggtatctttttgaatgacgaggctccttgcctgaccgggtgggtgaaacacacttatggcacgaattatggtgatcatcgtttttatgcccgtgtgttcgaactgattttgcgtctgcgcggtaactttatgtggcctgccatgtggggttggagtttttatgcggatgatccggagaacagcaagaccgcccatgagatggggattataatgggaacctcacaccatgagcctatggcacgcaatcatcaggaatgggtgaggaagcgcagcgaatatggggcatgggactatgcttccaaccagcaagtgattgaccgttttttccgtgaaggtatggagcgtgcggccgatacggaagatttgattaccattggtatgagaggtgacggtgatactccgatgggtggaaaggaaggagaagatgacaaatatgtgccgcgtgatgaggaaaacatgcgcctgatggagaagatattccggaatcagcgtcgcattatcaaggaagtgacgggaaaagcgccggagaaacgtccgcaggtatgggctatttataaagaagtgcaacgctattatgacatgggactccgtgtgcccgatgatgtgattatgttgctgagtgatgacaactggggggatgtgcgccggttgccggatgcaaaggagcggaagcattccggcggatgggggatgtattatcatgtagattatgtgggggctccccgtaattccaaatggttgaatgtaactcctatacaaaatatgtgggaacagcttcagttgacttacagctatggggtggataagctttggatattgaatgtgggtgatttgaagccgatggagtatcctatcactctttttatgaatatggcttggaatccggaacgctatgcggcagggaatctgttggagcatacacgagcgttctgtgcgcagcagttcggtgaggaacaggcggatgaggccatgcgtatcctgaacctgtattgcaagtacaatggacgcgtgactcccgagatgctggataaggatacttatcacttggcttcgggggaatggaggcaggtggccgatgaatatgtgaagctggaggcggaagccttgcggcagtatttgaaactggaggccgcttacagggatgcttatcgccaactgattctttttcctgtgcaggcgatggccaatctgtatgaaatgtactatgcacaagccatgaatcacaaattgtaccaggagaacaatccgcaggcgaatgagtgggccgacaaggtggagaaggcgtttaggcgcgatgcggaattgtgcagggaatacaacgaagaaatgtcgggaggcaagtggaacggaatgatgacgcagaaacatataggctatacttcgtggaacgatgatttccctgccgaccgtttgccggaagtttaccggatagagcaaccggaacaggctgtaggagggtatttgtttgccggtgacaaaggggtggtttccatggaggcggagcattattttgcatcatccgcggcaccggaaactgcctggacagtcataccgcacatgggacgtacgctgagcggagtggctttgatgccttatacacagtctgctgagggagcttcgctctcttataaaatgaaaataccgcaaaaagtagatacggtaaatgtgtatgtcattgtgaaatccaccctgcccttcctcagacgggaaggtcatcgctacacagtaggttttgaaggaggggaggagcagactgtctgtttcaatgcggagttgaacgagcatccggataatgtatatcgcgtactgtatcccacagtggcccgtcgggtggtgaagacccgggtgaagttgagcctgcccgaccgtgcggacggaacctatacattggttctgaaaccggtggagcctgccatcgtatttgaaaagattgtggtggattatggcggttatgaggatagttatttgtttatggacgaatctccttgccggagaaataaactgaatggacaatgaaaaacatcagattgacagtttggataggaatgatgtgcgggtgcttggcggcaggaatgttgcaagccggtacacgaccggacaatgcctgtccggcagaagaagacggcagccgcttgtggttgccggtgatgcgcccggcggaaggtgcggaagtggaagttatatataaaggaaaagtgtcacccaccatagccattgccattgctgagttgaaaaacgcctggaagggagagcctgtacttttggagaaaaagaggacagggcagggggatgggtttgccatcacttcttcggaacatcaggtccgtattctttcatccaccgaggcaggattactttatggtgtttattgtctgttgcgtatgcaggcggcggggcaggtcacagtacctctgtcggttactgaacaacctgtgtatgatcttcgcatcttgaaccattgggataatccggatggtacggtggagcgtggttatgccggtcgttctttgtggaattgggaagaacttcccggaactttgtcaccacgttacgaggcatacgcccgtgccaatgcttctgtgggtattaatggaacggtgctgaataatgtcaatgcctcgccccaagtgctggcaacctccagtctggagaaagtcaaggcattggctgatgtcttccggccttatggtataaaggtctatttatcggttaattttgcatctcctatccagttgggcaagttggatacggcagatccgttggacaaggaggtcatccggtggtggaggcggaaagtgaaagaaatttatacgttgatacctgattttggcggctttttggtaaaggccaattcggaggggcagccgggaccatgtgatttcgggcgtactcatgccgagggagcgaatatgctggcggatgcgttgaaaccctacggaggaatcgtgatgtggagggcgtttgtctatagtcctaccgacagtgaccgtgccaagcaggcctatttggagtttatgcctttggacgggcagtttcatgacaatgtaatagtacagataaagaacggaccgatagatttccagcctcgcgaaccttacagccctttgttcacagccatgaagcggactcccatgatggtggagtttcaaattactcaggagtatttaggcttttccaatcatctggcttatttggctcctttatgggaggagttttttggcgaggtgcgtccggataggttaaaagctgctgcgggtgtggcaaacatcggtacggatgtgaattggtgcggacaccattttgcgcaggccaactggtatgctttcgggcggttggcatggaatccgtcgctgacttcagaccggattgcggatgagtggttgcggcagacgtttacttcccagccggcatttgtccgtccggtcaaagagatgatgttgcagagccgggaggcggtggtgaattatatgatgccgttggggctgcatcatcagtttgcatgggggcaccattatgggcctgaaccgtggtgtagtgtgcccggtgctcgtccggactggttaccttcttattatcataaggcagataaggagggaatcggtttcgaccgtagcagcaaagggagtgatgccgtttctcagtatcccgattcacttcgtcagatttacaatgacaaggcaacttgtcccgagatttatttgctttggttccatcatgtgccttggcatcatcagatgaaaagcggacgtacgctttggggggagttgtgccatgcatacgatagaggtgtgcggcaggtacgtggttttcaggaagtatgggacagtgtggaaccttttgtagatgcacgccggttcggggaagtgcagtcgaaattgaaaatccagatgcgtgacgccgtgtggtggaaagatgcttgtctgctttatttccagactttctcagggatgcctgttccggccggcatagaacgtccggtacacgagttggaggatatgaaacgcttccggttggaaatctcgaactatgaatgtcctgagagtgggttcaataaataaattacggtttttaactttataagaaaaatgaaatataagttggctttagtaatgtcggttctttgtgcattttccgcatggaccgaagcaaaggtgaaattgcctgccatcctatcggacggtatggtattgcaacgtgagcggcccgttaaaatatggggaaatgccgataaaggagagaatgtgaccgttgtttttaaaaagaagaaattcagtacggtagccggggaagatggtaagtggctggtggagctgcctcccatgaaggcaggcggcccttttgaaatgaccgtgaatgatatccggttgaaagatattctagtgggtgatgtctggctttgctccggacagtccaacatggaattgaccgccggacgggtgactgataaatttgccgaggaaatagcaagggatgagaatccgatgatacggtatgtgaagattcctttaggcaatgatttgcatggacctaaagacgatctgccgggggcagactggatgtcgctgactaaagaaactgctccttccttctctgctttggcttatttctttgccaaggagatgtatagggagacgcaagtacctgtgggcattgttaactccagttgggggggaagttccgtcgaggcttggatgagtgaggaggccttgcagaagtttccgcgtcagttgcacgagcgtgatttgtttaattcggatgagtatcgtgagttgtgcaaccgttcgggacagatgatgaaccgtttttgggataccgctttgtacaaaggagaccggggacttcatgacgggatatgctggaatcgtccggaactggatgatacggactggcagacagtagatatgttttccaaggaatggggaagaaagaatggatatccggtgagtggctctcattggttccgtcagaaagtgaatgtatcagcggaacaagccggaaaagaggctgttcttcgtttggggtgcatggtggatgccgattcggtgtttgtgaacgggatttctgtaggtaacactttctatcagtatccgccgcgtatttatcgggtgccggcttctatattgaaacccggtgagaatctggtgactgtccggctgattaattacggaggggccgccagttttgtgcccgataaaccttattgtctagcatgggggacagatacagtccgtttgtccagccgctggaaatatcaattaggctgtgagatgcctgcacgcaccaacagtgtctcttttcagaatgttcctaccggcatgtataattccatgatttctcctctgcgtaatctggcctttaccggtgcgttgtggtatcagggagaaacgaatacgggccgtcctaatgaatatgaggaattgctggctgccatgattattgactggcgtgagaaactggctgataaagaattgcctttctttattgtacagctggccaatttcatgaagacacattcggagccggtagaaagtaattgggcggctttgcgtgaagcgcaacggcaagtagcgttgaaagtcccgaatgcagctttggcggtagcgattgatttaggcgagtggaacgatattcatccattgaataaaaaagaactggcaagacgtatctccctgttggtgaaaagaagggtgtatggtgataaaaagagtgtgcacagtgggcctatgtgtacgggtatgactgtcaatcatgaaggaaaggctgttctttctttcgaagccgggactgataaattatgggcggtagatgaattgaagggatttgcgatagccggtgccgatgggcattttcagtgggcggaagcagttgttgttaatgggaatcaggtggcggtatggcataaagatatccctcatcctgtaacggtacgttatggttgggatgataatccggttcatgcgaatttgaaaaatagaaccggactaccggcttctccttttcagatttcattggaagataaataatttaacagagatccgaaagtggcaaagctttctaataatcttcgatggattttaaaggaatgcttgtttctgtcggattttctatggcaaaaatacctattcctcctttgatgttattgggaaagatgacaggtgtttccaacaggttgctactgtcatggtcggcatatgcattggcggctcgtaaatattgatattcagccggggatatggcataatattgtatgatagcttttcctgttatctttttaattttatatagtttattgtctaataggaaactataccaactgtctaaagtcatggtatattggttgttggtaaagtaagcatcattgaatacattataatagttgtttatagtggggatgaaattaatgataggatcagagttgttgggagtgccaggttttccgtccattaatgcagtgtcataatatccgctacattcccattgggtggagatagcagtggagtcttgtaaagttttgcggttagtaaggcggtaagtatatgtttgttttatgttgacccggtaatattgggaatggtttgtggtgggagtttgtaattttattttccactttgttgcttgatatatccaaaggctttccgaagtctctgatagagaatgattagattcaatggtgtccgctttgataatttcaatgggctcatatactgttgcttctgcattcgctttatattttccgtctttggtttctacttcgatacgtacttgatcaccggttttaaaacggctgcttatctggtaaaaataattttgatagtctaacggtgaatcattgttaggacgataggtacattccgaaattgtttccgataatacattattaatataaaggtgaataattccattttttactacttggggttcgtgatagccggataaagctaaaaagatagcattgttcgttttgtttgcgtttatcagagcgttgacgatgagcttttgagattcatcattaggcaatatttctatatcattggtacaggcggccaataaatgaacaaatgaaaggagtaaaagtgcttttttcattattgcttaaaatttataagtatatgagaatgaaggtaagaagggaaggagagtgactttttgtatcacaggaatcttttttccttccgattgctcatccgtgtaataatctataaatacatgattgggattcaaagagttataggcattcataatactgacgttccaaatccgttctccatgttttgtctttttgtgaaagttgaatcctagattcaactgatgactggcgggcagacggtagttatttcgagaagagctatattcaaagggaaaaacaaccccgttgcctgtatttcccatatgtccccatccatagcttccttcggggagaatgatggttgctttctctttgggcagggtggcagtatttcctgaagcgtaaatccaagaagcgctcatgtatacttttttgttgaggcgcctgtttatcgtgatgttcacggagtggcgtctgtcgtatttatagggaaaacgtttccctccatttacatttcctttactgaatatacggtcggctttagccaaagtataatttatccatccggtagtacgtccggttttcttttccagcatgaattctatgccgaaattgcgtcctttgcccatttctactttctcttcccaatgaatggaattaccgactagagtattaccatctttgtattccagtacgtttttcgtcattttgctatagccttctacagaaaactcccatccttgaatacctgtatagtaacccccgatagaaaattggcatgcttgcatcgggaggatcttctgtgtgaccggtacccatagatcagtggggagagagagattggatgaagaaagtaaatgtacatattgtgtcatgtgggtataggccgccttgaaagtaaggttgggactggttttgaaactaacggtaatgcgaggttccaaggaggcataagtgtgcttttgtacttggaagagtgagaaatgtgcgcctatatttgttttccattgttcgttccatttgaaatcatcttctacataaagggaaatttcgtgtgagtgtgtcgcttcatttcctccgatggtgtatgttttatcaggttgttcttgttcattcggagagtgcacaaatgtatgttgggtttcggggcggaacgtatggtagagatagtttcctccgaatttgatgaaatgggagggggatggatgaaagtcgaagtcagatgttaatccccaatcttctataccggaataatattggctgtcaaggtgtttgttggcggacgtgaaattgttttttatattgaatcggaaacggttataggatagggtgatgttatggaacagacgattactgactatgtggttccaacgtaatgcccctaatgtacttccccaagccatgacttgtctctctcttgtgtctgtctccttttcttcttcaaagtaataagaagaagtatttgtaaaactggcatgatctttgccatgataaaaggagaaaaacaggcggtcacggtcactgaatcgatgatttagttttgtgttgatatcatataagtagtaacctcctttcgtatctttatccatgaaaggcttgataattaaatcggcataactgcgtctggcagaaataataaatgatgtccggtctttccatagaggaccctcaaagtgcattcgagaagtcagcagcccgatggtcagactgccgtgataattcctcatatctccatcgttagtgcgtacatcaatgacggaggacagtcttcctccgtaacgggcaggaaaactgcttttatacaaatcgactttcttgaccgattctggggtaaagatggagagaatacctagtgtatggtccacattatataagggtacaccgtctagcagataaagattctgatcgggacttcctccacgtacatacaggccactggtaccggttatacctccttgtataccgggcagaagctggattgattttaatacatctgcctcactcagtaaagcaggggtatttttaatatgtgtcaaaggtatattgtttgctcccatacggctactttgaaagcctgtttccattttatcagaaaggacaacgatttcttccaatgtattatcgtttttaagttggacagtcagcagcgtatctttacataaatacaatgctatttgttttgaaccgtaacctatataggaaaaattcagttcagtgtttccttcgggcagtgtgatactgaagaatccgaatggatttgtgattgttccttgtttattttgctggtcatagatattggcacctatcagtgtttctttcgatatttcgtccaatacataaccgtttagtgtaaaatgttgttttataggaagtgacgttgtttttttcaatatgatatggtgtttggtaatctcgaaactgatgtcttgtttaatgaaagctgtttgtagaatagttgttaatggggtttctttcagatcgagagttatgggatgtttgagtacaacttcttcgccataaataaaagaatactctgacagttgttctattttagctgtaaactcctttaaactagcctgtttcagataaatattaaaaggcatatccggagtttgtgctgatatgaatgaatgggaaaagactagtaacagcattaagtaaaaaaaagtgatactgtgtttcttataaagtgaagaaatcatttgttttttagttttcttgctttagttcaataagattggattggggcatgtgataagtaaaacctacgatgggagccaacatttctagaatttcttccaacgtttcgttttgcttgaaacgtgcatttaatttataattacgtaactgttcgctttttatctgtatggtgacattaaaatgatgggatagttgacgagcgatttctcccatagatatgtcattaaaagaaagaacaccttcacgccaacttatttcgttctgtgcatttgcattaatgtgcatagacaatattccagtcgatttacgataaatggctgtttcattgggctttaatatcatttgtttaccgttggcattgttactgacggatacactaccttccagcagggttgtttctactaaagaatcggcggcataggcattgacattaaaatgcgtgcctaataccctgatggtaactccatttgctttgacacgaaatggttttttaggatttttactgacttcaaaataagcttctccattcagctttacgattcgttccttgttgaaagtttccggatagctcaattgggaatgtcggtttagggttactttagagccatccggtaattggatgcattgagtttgtatattggtggaaacaatcagtgtacgtaccggacgttggtaaaaataaaacatccaaccgaaacctataagcaggacgaaaccggcagccacagcaactgtataccgaatggaaagtattttgtgcttgcggtatgccggttgaagacgttgttgcaatatattataacttttctccgccgagaattttccctgcggtgaatgagtggaagaagataataattccaaccattcgtccagttctttgtctgatttcggtgaattcatgttattttatttgcaggacaaagatactacttcttttgcagacggatagaaatttcagaaatttttgcgtcttttccgtcaggagtacagatcaaccgtatgatacgttgtacgctttttatttgtttaggataaagaatgatatctatttttactgatttctttcctttcaagatgaccggatgggcattttgaatgtggaagctattgttacttgtagaactgctaatggtcagtttacggtctgtgtcttgtttttcggcagctattatttttaaagtaagggtttcttcctcgttctttgtatcataggtgtgtgatatgaattgtttttcaaagcctatatactctttgggatagttgtcgttgttactacatgcacttataagcagggcataaaaaaatggtaatactaaacgtgtatttgttctcatgtctttttagtttattagtttctattgataaagacaggagaatctggaaaactccctatcgtctatttctaaaataattgttaattttttctttgagtcgggttacagctttttgtaactgggcatctactgttttagggcttatattaagttcttcggcaacggaagcataactttgtttttcttcgcggactttaataaagattgttcggcaacgttcaggtaattcattcagtgagttctcataaatgttaaataactcttcattcatcatttgttcttcaggagaaaggttggaagaagatatttccggcatattttccagaggcgaggcttccctcctttgttctttttccaaatagttcagagcggcatttcttattaatatatagctgtacttattaaaatcatcgggaataagctgactttttcgatgattccaaagcgtggtaaaaacatctaaaattacttcttgagcccattcatcccgttgaaggtaataaaaggcgatacgaaagaaacggtcataatacatatcgtataaagaccggaaagcctgttgggaatcatgcttctgtatttctttgagtagttcagttgcctccattgccgtgttgggcatgtttgttaatgttataatcggatgcaaagctactaaaatgtaaatagatgtgctattcattttagaacttttagttttgatttattgtatgagaggaactgaagccttcttcttagtatctgtcttggcaattttcttctttcaatttgtattttacttggttggcaatactgaatatacctattcctccttttatattattgggaataaggggaactgcataaataaaattttcggcatcaaaatctaatgcagaggacatggcatacaaatatctatgttcgctttctgaaatactgtaaaaccggatactgatatatcgctctgctttctgagaatctatatgtatatagttgatgtcttcttttaaatctatcgtcatgttatattccctgtttttaaaataacagcttttaaaaaggccaaaataattgttccatttctgaataagctcgaatccttcatctatagcatgtccgggtttgccgtctgtcaaggcggtgtcataaatataattatagttataagtcgtgtcaatactgagagtgtccctgccgtcatgccatttatgagaataaaaaatctgttttatttcaagacgatagtatgtattctctgcctctatatcgggttgttttaattgaatgttaagccgaagataattgtcatatacaggcttgcctcctacccagctgttataatctcttaaacttatataggttgtatctacatttataatctgtaagggtgcactgatgcgtgtttccgcttttgctttatatttaccattttctgaagaagcctctattttcactttatctcctgttcggaatatgctttttactgggtagtaatcatcttccgcagtgattgtttctgacagttttccattgatatacaggtgtatgataccatcggtgacaggagtggtagctgtccatcctgtgtaatgcagataaatccggttatcgttattttcagtttgcatcatggcatttacgatcagttttttaggttcatcatcgggtaaatagccaatggtattggtacatgcgcctaaaataacaaatacacaaagaaataaaaggtattttttcattggattttaaaatttataagtgtatgaaaatgaagggatacatggcaagattgtcatttttttcaatataggctttcctgtttgtgcttccctgctgatatagacaaagttggggttcatggcattgtaggcatttaggatactgatattccatatccgttctccgtgccgggtctgtttatggaagttgaatcctatattcaattggtggcttgcaggcaatctgtagttatttcgtgaactataatgatccatatctcctttgttcaaattatccataatccaggaaggtggtacattggtaggtggtagttctgtatgtgtcttctctgtaggaagtgttgccatgcaacctgatgcataagtccatgacatattgaagtcgatccgtcgtgtcaattgataatttagagtgagattcaaggtatgtcggcggtcatattggtaagggaaatgtttaccattattgatcccgtccgtactgaattgccggtcggatttggatagggtgtaattaatccatccagtaaggagccctgcagttttttgtgccataaactccactccgaatgaacgtcctttgcccatttctactttgtcttcccagttatgggaagaacctagaaaactttctccgtctttatattctaatacattatacatatctttatagtatccttctatggaaaattcccaattcttgataccggtatagtatactcctacagcatattgaaaagatttcatggggcggatgtggcgtgtgacgggcacccaaaggtcggaaggcatggccagtgatgcagtagataataattgggtacactggctcatctgtgaaaaagaactttttaagatgatatttgaggtcgcttggaaacttatggaaagacgggattgcaaagaaagataagtctgtttttgtacattaaaaaatgaaaagtgcaatccggcatttattttccaatgttcgttcagaataagatcatcttcggcatacaaggaaaagtcatgagcatggatatgagaattgttcaaactataattgtcgttagtttgtggatatccattgtcggaattgtgttgatttacggtctgcacttccggagcgaactgatgatatatgtatttcgctccaaatttgatgttgtgtgccggtaacggatgataatcaaaatccgtactaatgctaagatcactgatgccggagtgaaacagattgttggaaccattgatgattgtggaaccatcaggttgttgtatgctggaagtttcctcttgtctgatatcaaaaacataacgattgtatgccagcgtagtattactgaatagttggggggtgaaaacatgattccagcgtgtgttcagtaatatgtttccccaattgtgagtttgcttgaacttatcttcatctttgtatttaacgtgagttcgaaataagaataaatatatttcacttataattagaaacatagcgataaaagtattaaatttatagtgctgaattataacatttaaacgattaccactatgtttccagagtctaaagttacagagatttattgtatggccgatgatttttgcaaggaatttacattgcaacaggaaaaatatatgattaaggatatgaagaccatgcatcgtaacaaacccaaccgtatgagtgatgcagagattatggttattctaatcctgtttcactccggtggtttccgttgtttcaagcattactacaaggagtatgtctgtaaacatctgaaacacctttttcctcgtcaggtttcttataaccgttttgtggaactggagaaggaagtattgcttcccatgaccatattcatcaaaagagtactgctgggaacttgtaccggcatcagtttcgttgattccactcccttatgtgtatgtcgtaaccaaagaatcttgattcataagacatttgaagggcttgccgagcgtggaagatgttctatgggatggttcttcggattcaagctgcatctgataatcaatgacaagggtgaaatcctcaatttcatgttcacgcctggaaacgtggatgaccgggaaccgttgaaacagggtaggtttctggaaaacatcaaaggaaaactatgtgcagacaagggatatataggtcaggctctgtttgaaaaccttttccttaatggcatacaacttgttactaaagttaaaaataatatgaggaactcactgatgagtattgccgacaagattttgctaagaaaaagagccttgattgaaacggtcaatgacgaactgaagaacatcgcacagattgaacactcaagacatcgttcattcagtaactttatagccaactccttgtcggctatcgcggcatactgcttttttgaaaagaagcccgccattgacgtaaagtttgtcaatgacggacaacttgctattttttgattttatttcgaactcacgttatttatagtagacgtggtcttttcctttatagaaagagatgaaaaggcgatcttgttcactaaagcgatgatttagcttggcgttgatgtcatacaaactataaccgccccgttcgtcctttggcataactagtgggaggaaacagtcaatataactgcgtcgtgctgagataatgaaggaagtatgatctttccatataggtccttcaaattgcagatgtgaagtgagaagaccgatagtcaagcttccatgatagtgctgcatgtttccgtcattggtacggacatcgacaatagatgaaagacgtccgccgaatcgtgccggaaagctacttttgtataaatcgacttttttcacggcttccggagtgaagaccgataacaggcccagtgtatgatctacattatataaaggtacaccgtctaataaataaagattttggtccggacctcctccgcgtacatataacccactggttccgttcattccgttttgtacaccgggcagtagttggatggattttagtacgtctgcctcactcatcaatgccggtgtgttttttatgtggggaataggaatactgcttgctcccatacgactgctttgaatacccgtttcgggtttgtcggacaagataatgacctcattcagttggttgtcattgtggagttggatggtcagcatagtatctttccataggtgcaaagacacttgttttactgcatagcctatgtatgaaaagtttagtttagtgcccccctcaggcaatgtgatgctaaagtatccgaaaggattggtagtggtacccactccgtttttctgatcataaatattggcacctatcaatgtttctttcgatatactgtccaatacatacccgtttagggtaaaagacttcttgctggattgtagagcgtatttttttaatataatgtgatttttgtttattttgaaactgatattctgtcctgcaaaggctttctgtaaaatcaggcttaatggagcttttcttagactgagggttataggatgtttaaagatgatttcctctccataaataaaagagtagccggaggctttttctatttcaaatatgaattctttcagattcgctttttttaagtgaatgctgaaagaaagatctgctttttgagcctgtatgaatgtagtggaaatcattagtaacagtatcaagaaaatccccttgatactgtattgattgcaagttgaaaaaatcatttagtttttagttttcttttattattcaataatttatatgcctttattcagggtctgttatcctccttgtaatattcggagaaagagtttccaaaatttgatttgtgttatggttgcattcggaactcttttgttccgttttcctgtgttcttcagaatcgttttcgctattgtaagcataagcttccattaatgcatggaagaatggaagaactatgcgcgtacttgttttcatatctttttagtttattggtttatataagtaaagacagggaaacttgaaaatctccctatcgtattttataaaattattcatttatttttgggggatgcttttaaaatagcatatgtgaatattcgctgaagtattagttactccacccaaagcatgtcgctcatgatcccgtctgatataaaaacgcctttacgggtcagttttagcgtatcgttttttatttccagtgttccttgttgtaaatgtggagtggccatacgtaggcagtatttgtacagttcttctccatattgtttcctgagtttgggcagtggcattccccattgtgtacgtatgtgggtaatgacaaaatcattgtaacgggtatataagtcaagttcttctacttcgaatgtgggatttccgttagaaatacctcttatatattcgtttagtgaggctacattccattggcgtgaagtaccattgtatgaatgtgcggaaggaccacagcccaaatatttcttttcagtccaataactggagttgtgccgggaatgaaaaccgggtaggcagaaattggatatttcataatgttcgtatccggcagcggtgaggctgtcaatcagtgtgccgaataaggaaacgctcagatcttcatcggcctcttccagtttatgttgttcacgaagttgccaaagagtggttccttcttcataaataaggtgataagcggaaatatgttccggatgcaaagcgagggcttgttttaaatcttctttccacgaagcaagtgtttctccgggtagtccgtacatcaagtcaatactaatattccggaaaccggcagtacgacagttttggaaagcacggatggcttgttcggctgtgtggcggcgttgaagcagttttaaagtggagtcttgaaaagtttgaattcccatacttatccggttaaaaggaaaggtgcgtaacatggaaatgtattctggcgttaagtcatcgggattagcttccaaagtgatttcagcatcggggattactttgtataccttataaatatgggagaagattgcttcgaaatcttcttttgccagttgcgagggagtgccgccgcccagatatatcgtttctatatgctcgccttccagataggcttcccggtcggttagttcgcggcataaggcacggatgtatgctgttttctgttcgctacgggtggtggagaaaaaatcgcagtaaatacaacgttttttgcaaaaggggatatgtagataaatacctgccatgatcatttatttttcagcaaagctacgaaaaaaatagtgataagatagaatatctgccgtaaaacatagtttagtaacactatcctttgagttgctttttttctctttattttctaatttgcgctccacatttttaggagatatgaaacacatatccgtttgttaataattaaaccttagatatcatgaaagtatatcagactaacgaaattaaaaacattgcacttcttggcaatgatggctcaggtaaaaccaccctcacagagtctttgctctttgagagtggtattataaaacgtcgtggcagaattactgccaaaaacacggttagtgattattttccggtagagcaagaatatggttattcagtgttctctaccgtttatcatgtagaatggaatggaaaaaaactaaatataattgactgtccgggtagtgatgacttcgtaggggctgccataaccgcgctaaatgtaaccgatactgctattttgctgctgaatggacaatacggtcccgaagtaggtactcagaaccacttccgttatactgaaaagctgggcaagccggttatctttttggtcaatcagcttgataatgagaaatgtgactatgacaatgtgctcgaacagttgcgtagcatttatggctccaaggtagttcccgtgcagtatcctcttgaaacgggacctaattttcatgaactcattgacgtgctgttgatgaagaaatattcatggggacctgaagggggcgctcctacaattgaagagattcctgattctgagaaagaaaaggcattggagatgcataaagctttggtagaggctgctgctgaaaatgatgagacactgatggaaaagttctttgaatcggaatcattgactgaagatgaaatgcgtgaaggtatccgtaagggattggcggcacgtggtatgttccctgttttctgtgtatgtgcaggtaaggatatgggtgtccgtcgtctgatggaattcttaggtaatgttgttccattcgtgtcggatatgcctgtggttcataatacccgtggtgttcctgtgcctcccgatgcgaatggccctacttctctttatttcttcaagactgccgttgaaccccatatcggtggtgtgcagtattttaaagtgatgagcggaaaagtacacgaaggtgacgatttgactaatgctgatcgtggctctaaagagcgtatggcacagctttttgtttgtgcgggagctaatcgtattccggtgcaggaactggtagccggagatattggttgtactgtgaaattgaaagatgtaaagactggaaataccttgaacggcaaagactgtgaaaaccggtttaacttcattaaatatcctaatgctaaatactcgcgtgccatcaagcctgtaaatgaggctgatgtagagaagatgatggttatattgaaccgtatgcgtgaggaagatcctacttgggaagtggagcaatctaaggaattgaaacagactattgtgcatggacaaggtgagtttcatctccgtaccttgaagtggcgtttggaaaataacgaaaaattgcagattaagttcgaggagcctaagatcccttatcgtgaaacaatcactaaagcagcccgtgccgattatcgtcataagaaacaatcaggcggtgctgggcaatttggtgaggtccatctcattgttgaaccttattatgaaggaatgcctgtacccgaaacgtataagtttaacggtcaggaattcaagataaatgtgaaggggactgaggaaatacctttggaatggggtggtaaattagtctttattaacagtatcgtgggaggatctattgatgcccgttttatgcctgctatcttgaaagggattatgagccggatggagcagggtccgttgacaggttcgtatgcgcgtgatgtacgagtgattgtttatgatggtaagatgcatccggtagactcaaatgaaatctcttttatgcttgcaggacgtaatgcattcagtgaggcatttaagaatgccggacctaagattctggagccgatttatgatgtggaggttttcgttcccagcgataaaatgggcgatgtgatgagtgatttgcaaggtcgtcgtggtatgattatggggatgagcagtgaaagtggatacgaaaaactggttgcaaaagtacctctgaaagaaatgtcttcttattccacttctttaagttctttgacaggcggtcgcgcttcatttattatgaagtttgccagctatgaattggttccgacagacgtacaagaaaaattgatgaaggaatttgaagctaaagagaataaagatgattgataaagtgtaaaatttcgtacttagaagagacgtatttcgttaaaaatgcgtctctttttatttaaggtaacttaaacttttaggtttgttatttggctttgaacttaattttttattatttttgcaaaccaattggcgtaaattttgttataatagtcagaatcttagcttaaatgactttttcggttaattatagagaatggccgtttaaatttggttaatctattgtgtgatgagatttaacgcttttaattttgctggcatgaaaaagtctactatttgggtattaggtattgtaatggggctatcatttcttagcttgttgtatttgcaggtaagctatattgaagaaatggtgaaaatgcgcaaagggcaatttgatgagtctgttcagcgcagcttggtccaggcgtgtcggaatattgagttggtggaaactaaaaagtatcttgaggatgatgcgattgctacggaaaaagcagcacagctgtccagggagcagtccgaagagaagaagggggaaggaagtggtgatgtggtggcgcatacgcatgagtattccattacttccgacggattgaacggttactctacttttgaattgaagatgaggttcagtgcgaatcgtccttctaatattcctaaagcaattatttcgactggtaagaacattcctcagacttcaagagccttgcaggaaataatcaaagacagatatgtgtaccaacgtgcattgttggacgaagtggtctataacattttgtatacagctagtgacaaacctttgaacaaaagaatcaactttaaacagttggacttgtttttaaagacggaattgctgaataatggcattgacattccttatcattttacggtgacagaccgtgacgggacggaagtttaccattgccctgattataccaaagagggtagtgagaatacatatccgcaggttttatttaaaaatgatcctccggctcgtatggcgacagtaaatattcattttcctacattgaacagttacatattcagttctgttaaatttatgatcccgtcactgatcttcacattcgtattgcttgtgacgttcatctttactatctatatcatcttccgtcagaagaagttgaccgagataaagaatgatttcataaacaatatgacacatgaattcaagacgcctatctctaccatatcgttggcggcccagatgttgaaagatccggcagtgggaaaatctcctgctatgttccagcatatatccggagtgataaatgatgagaccaaacgtttgcgtttccaagtggaaaaggtgttgcagatgtctatgttcgaaaagcaaaaagcgacgctgaagatgaaagaggtgaatgcaaatgatttgatagccggtgttgtcaatactttcacgttgaaggtagagaaatacaatggtaaaatcacttcgaatctggatgcggtaaatccggatatatttgtagacgagatgcattttacaaatgttatttttaatttgctggacaatgcagtgaaatataaaaaacaggaaggcgaattgttgttgaatgtacgtacttggaatgaatcgggcaagctttatatctctatccaggacaatggaataggtattaagaaagaaaacctgaagaagatattcgataaattctatcgtgtgcataccggtaacctacacgatgtgaaaggctttggtttgggactggcttatgtgaaaaaaataattcaagatcacaaaggggctatacgtgccgagagtgaattgaatgtaggaactaaatttataattgtattacctttattaaaaaatgaataatatggacgagaaattgcgtatcttgttatgcgaagatgatgagaatcttggcatgctattgagagaatatttgcaggcaaaaggctactcggccgaactttgcccggatggtgaggctggctacaaggctttccttaagaacaaatacgacttatgtgtattggatgtgatgatgccgaagaaagacggttttactttagcacaggaaatccgtcaggctaacgctgaaattcctattatcttcctgactgctaaaactttgaaagaggatatattggaaggcttcaagattggtgcggatgactatatcactaaaccgttcagtatggaagagttgactttccgtatcgaggctattttgcgtcgtgtacgtggtaagagaaacaaggaaagcaatatttacaagattggtcgttttactttcgatactcagaaacaaattttggctatcgatggaaaacagactaaactgactacgaaagaatccgaattattgggcttgctttgtgctcatgctaatgagattctgcagcgtgatttcgcattgaaaaccatttggattgatgataattatttcaatgcacgaagcatggacgtgtacatcactaagttgcgtaaacatttgaaagaagatgattctatcgagattatcaacattcacgggaaggggtataaactgattactcccgaagtagaataaggctgagtgaaatagatgaaataaaaaagtccggaacatttgtttcggacttttttatttttgttctcttatactttaatcaacaatgcgtttgtttaatacaatataaacgattaaacctataacgataagggcggcacttccacctaaaacaccgttgtcgttaattgctgcacttccggtgaagaaaacaccgactaaaatagcggcgccgatgatcatcagtatcagacctaaattcttaagtaagcttttcatgtgtgtattttattaatagattatatttattcttgtgtacaaattaaagcataattctcttatcatggaaattattttaggaaaaaaagatgaaaaccttgaaaaactttagtctttgatgttggtgaatacctttcttaatacatcttggctgactttcagttcttccaatgttaatccttgcagtgcttctttcaatgtcttgtttgcgatgaaacgtgctttgccttccaattctctgccggttttggtcaaatgaattaaattggtgcgtcgatctcttttgtcggctatgcgtaccaccaaatgctggcgttccatattgtctatcaagcgggtcatgctgggtttgtctttaaaagtggcattacatagttcttgctgtgtgacaccatctttttcccatagaaaaagaaggactgtccactgttcgggggtaatttctacaccattctggcgaaaattccggcttagtttccggttgatggcggcagatactttgccatttaatatggcaaatattaattggatatcaaaactaaattgttctatcatggaattattgtttaaacaactttgcaaatatacaattcttggcggatataacttgtttttcacagataaaaaatatgaaaaggaaaattaattgtaaaatgaaactatattttttgaagaaaattgcgataactctttgtagattaagataaaatatctacttttgcactcgcatttgaaatttaatttaataatttaataaacgtagtatgaatcaatacgaaaccgttttcattttaactcccgttttatctgatgttcagatgaaggaagcggtagagaaattcaaaggtattctgactgcagaaggtgcagagattatcaatgaggaaaactggggcttgaaaaagctggcttaccccatccaaaagaaatcaactggtttctatcagttgatagagttcaaagcagaaccgcaggttattgaaaagttggaaattaacttccgtcgtgacgaacgtgttatccgtttcttgacttttaaaatggataaatacgctgctgaatatgctgctaagagaagaaatgttaaatcaactaaaaaggaggattaatcatggcacagcaacaatcagaaatcagatatttaactccgccctcagtagacgtaaagaagaaaaaatactgccgtttcaaaaaaagtggtattaagtacattgattacaaagatcctgaattcttgaagaaattcttgaacgaacagggtaaaatccttcctcgccgtattacaggtacttctctgaagttccaacgtcgtattgcgcaggctgttaaaagagcacgtcacttggcgttacttccatttgtaactgacatgatgaaataataaggaggaataagtatggaaataattttgaaagaagacgtagtgaacttaggctacaaaaatgatattgtaactgtgaagtctggttacggtcgtaactatcttattccgactggtaaggcagtgattgcttcaccttcagctaagaaaatgttggcagaagagctgaaacaacgcgctcacaaattggaaaagattaagaaagatgctgaagctatggcagaacagttgaaggatgtaaccttgactattgctactaaagtgagtgccacaggtactattttcggttctgttagcaacattcaaattgctgaggaattggaaaaattgggtcacaaggttgacagaaagattatcgttgtgaaagatgcagtgaaagaagttggttcttacaaagctatcgttaaacttcacaaggaagtttctgtagagatcccgttcgaagtagttgctgaataaaatctgtaaatactttaaagtataatgatgctgaaaaagcccggttcgtgagagccgggctttttctttttaatatgtttgatttattaattcaatcgtttcttttataactttttgaggagtggtaaaaggattttcattaaaagtatttggcatagtgaggatcagttgtttgatatcatattcttgtagtctggctgcccatacttcataaatactgttataatttttatgaatattattgctggtttggtgagataaatagcgagttatatggtcctgtttgtatttataatagtctttgttgtcttcatttatttttctgcatcctttataggcttgtaaaagttttaaaatgaactctttgtcaggtatctgctgcatcagcgctgagcttttcagtacttctagcgcatcttccgaatactcacaattttcatacgcaaaaggagcattggcattgttttctaaaatagaagctttaatggtttgaagtgaatcctgtttttgtattaacaatcggaagaaattaatttcatttaaatatgcggcttcggcctgattgatactttttaaattctcttctaattccatttttatcatttgcatacttttatttatctgcttctcttgtgaggcactgtttataaaatcagttccggcaagagtgataaatactccggcagtgacaattgataattcgcggaaataatttcccaacttccagttttgaagtttctcttttagatttgtctttttcatattctgcttttgtttgtggttcgagaaacaaaagtagataatttgtattgtaaagcaatggaatgctggcagaaagggagaggtaaaaacataaaaaaagtctgttgtgctttcgcacggcagactttcaattctctctagagttcgtactgaattattcagccttagtagagtcacagcaagcagctgtagagtcacaagcagctgaatctgctacaacttcttctacaacagcagcttcttctactactgcaactgaatcagttgcttctgcgttgttgttagcagctttgtttccgcaagatgcgaaagaaacagctgcgaaggctacgaacaaaaatactaattttttcattttctttgctttttaaatctgtaatactaatgttgctttcttaaaacgatgcaaaggtatacacttttttaatacgttgtaccaaaaagaacaactttttttctaattttttatgttatacaacctattttgctgattagtagcatgttttacaacatatttattcttcggtaatactgttatataagaatcgcttgatgctttttttgggagttttttcgaactctgtgggataaagttgtattttactcacttgttcatagtttcctaccagtttattcagattcttcaagttttcatccattactgtttttaggttttcgggggtattgagtcccagactgtccagactttcataatcaggatatactaaagctaccagtttcttgttgcgctctatgattaaactttctagaacgaatggcatattatttagcttggattctatctcttcaggaaaaatattctgtccattagaactcaagatcatggttttactacggcctcttatataaatgaatccgttagcatctattgtacctaaatcgcctgttttcaaccaaccatcttcagtaaatacctcacgggtagcttcttcattcttataataacctttcattacgttttcaccacatacctgtatttctccggttatgttataaggatcatccgagtcgatacggactttcatgatatccagtatctttccggcagaaccaggtataaattcattccatggagcataactgatcagtggggcgcattcggtcatgccgtaaccgatggtgaacggaaattttattttgtggaaaaaatcggtgacttccggattcatggcagctccaccgataatgacttctttaaaacgtccgcctaatgcgtcaatcagttttttgcgaatctgtgcataaatctggttgtctagtaaaggtatgttaagcgcccatttcatgctgcgtttgttgatgagcggctgaattacattcttataaattttttctataactaatggtactgtaataataaggttgggttttacttcctcaaaagctttcatcaatattttgggagaaggtgtcttgcctaataaggtgacatgtgtgccgacagcagtagcggttagaaaatcaaaagcacatccgtatgcatgggccaagggaaggaaggaaagtaccttttctcctttctttaaaagttctgtacggataccgaaggtaacgtttcctgccagattattgcccgtaatcattactcccttactgaatccggtagttcctgaggtataattcagtaacatgaccttctcattggagagttctgtataattgatattttccttatagaagcctttggggaaattctttttcattgctgcatccatatttttcatgaatttttggacagtttcaccgtcacgttgatgcaggcatctgaaatctgttagagaaaatacagcgcgtaatccacttaatgcttcttcttccaaattttcccaaatattatcgctggtaaacaggaatgtggattcggaatgatttacaatatgatggacatcattcggcttgaagtcttgtagaataggaactacaatagctccgtatgtaacagttgccaaataagcgatacaccaacgggaagtattcttacctataatagatattttatcaccacggcgcaggctgcaatattggaataacaagtgtatcttagctatttcttccgctacttgtccgtatgtaaacgtggtatcttcaccataatctgtgtaacagggaagatcccagttttctttgaagctattctcatatagcttgataaagttttcttttatcattgcacaatttttgatgtaatgtgcaaaaataagcataattattggtattctaaaaaatttaagcagaataatatgtacctttgctcgctaattagataaaaaggtatgattgatacgacaattttccaggataaaacggctgtttattatacattaggctgcaaattaaacttttcagaaacttcaaccatcggtaaaacactgaaagaagcaggtatacgtacagcacgtaagggtgagaaagctgatatttgtgttattaatacttgctctgtaaccgaggttgcggataagaaatgccgtcaggccatccatcgtttggttaaacagcatccgggtgcctatgtagtagtgacgggatgttatgcccagttaaaacctgaccaggtggctaatatagaaggggtggatgttgttttaggagctgaacaaaagggagagttgatgaattatctcggaaatttggaaaagcatcctcaaggtgaggcgattacgacagctgcaaaagacatacgtagtttttcaccttcgtgttctaggggtgaccgcactcgttattttctgaaagtgcaggatggttgcgattatttctgttcttattgtacaattccgtttgctcgtgggcgtagccggaacggacgtattgaagagattgtggaacaggcgcggcaggccgcagctgaaggagggaaggaaattgtaattaccggggtgaatattggagacttcgggaagacaaccggtgaaagtttctttgatctggtaaaggctttagatcaggtggcagggattgaacgttatcgtatctcgtctattgaacccaacttgctgacggatgaaataatagaatatgtgtcacgttcacgtgcattcatgccgcattttcatattcctttgcagtcgggaagcgatgatgtgttgaaattgatgagacgtcgatatgatactgcattgtttgcttccaagatacgcaaaattaaggaaatcatgccggatgcgtttattggcgtggatgtaattgtgggaacacgtggtgaaacagaggaatattttgaagatgcttatcgttttattgaagggcttgatgtgacgcagttacatgttttcagttattcggaacgtcccggtacgcaggccttgaaaatagagtatgtggtgagtcctgaggagaagcatcgccgtagccagagattgttggctttatctgatgcgaagacaaaggcgttctatacctctcatataggaagggaagcttgggtattaatggaaaaatctaaggctggaactcctatgcatggatttactgataattacatccgggtggagatggatcacgatgatcaattggataatcagttgattcgtgtaagaatgggaggctttaatgaagagggtacagcgttgaagggtgttttagtctgaattattccatacatttggtattagtctgaaaagaaatgaaaagggtgtctgttgttatattgaattggaatggggtggatatgctccgtaagtttataccttctgttatggataattcagtaggagaggggattgaaatatgtgtggctgataatgcgtcctctgatgggtcgcttgaaatgcttcgttctgaatttcctgtagtccgtttgattgagctggatcagaattatggttttgccgaaggatataaccgggctttggagcaagttgatgcagaatatgtagttttactgaatagtgatgtggaggttactccgcattggttggaacctttgctggattatatggacacccattccggaacagttgcctgccaacctaaattattaagttggcataataaggaatattttgaatatgccggagcgtcggggggatttatcgaccggtatggatatcctttttgcagaggacgtatttttgatgttgttgagaaggattgcggacaatatgatacggtaacggaggtgatgtgggttacaggagctgctctttttatccggttggctgattatcgtgaagttggaggtttggatggtcatttttttgcccacatggaagaaattgacctgtgctggcgtttgcgcagtaggggaaaaaagcttgtctgtattccgcaaagtgtggtatatcatgtaggaggggctacgttgaaaaaagagaatccgagaaagacttttttgaatttcagaaataatctgttgatgctttataagaatttgccggataaggaattggaacatgtactttttatacgtggtatactggatagagtggctgcccttgttttttatctgaaaaaggatagagcgaatgcgcgtgctgtaatgcaggcgcggagagaatttgaggatataagatattcttttgccgcttctcgtatagaaaatatgatgaagtctacagatgagataattccggaacggactcattttagcattgttatgaaatattatttgttgggcaaaaaacatttttcccagttgaaacttttttaaattgcttctctttatatttctttttatagcattattcctgtatctttgtttgatgaaatttgatcaaaaaagaaaaggagctgtaaaatgaatgttcatgaggtaaaatctattgaaacaaagtctattctgtcacgtttgaaaagtaaagataattattggggaattgcttataacatgaacttgtatagagggtgccaacatggttgcatttattgtgatacacgtagttcttgctatggtgttggtgatatttctcatatctctgtaaagaagaatgctttggaattactggatcatgaactgggaacgaaacgtggaaaagcaaccattggcacaggttcaatgaatgatccttatatgccgttggaaaaacagatgaagctgactggaggtgcgttggaaattattgccaaacatcgttttcctgttcatgtgataacaaagagtagtcttgtgactcgtgatgccgatgtattgcaggatatagggcgcacttatgctgccgttagttttactatcactacagcggatgacgagatggcgcgcaaactggagcctaatgcaccggcatcttccgagcgttttaaggcgatgaagatattgtccgatcggggtatatatacaggagtggcattgatgcctgttttgccttttataaacgattctatagaagatattgaggaaatagtagagaaggctgccgaagcaggagcgtcctatgtgcttcctttgttcggggtaactttaagacggggctcccgtgattatttttatgataaggtagagcggatttttccaaagatggccaagcgatatcaaacttattttgaagaccgttctgaatgcatttctcctaatgctccctatttgaatgaggttttttatcgcagaatagaaacattaggaatcagtgctaccatgaaattttatcattctgaaggaagaaaacaactttctttattttaataagtagggtcatgaacatggtctgtatattcattattattggtttgtgttgttatttgcacgatagcatatttacgtttttaagaggagggcatgtaatagggtgaacttaattaaatgactggatgtttgtcagataatttttttcatcgtgtataatgtacttctactccaacatttctgcaatcactgcccataggcggattttcttttgacaaccggatgattatttcctgaatagttggaaaatcattaaacagtctttgccctatgcgttcacagacatgctctaaaagtttggatggagttttcatctcttttttgacgactgcatatatatcagcataacttacggtgcctttcagttcgtcagtttgtgctgcatgggtgaaatcggttcttagtcttaaatcaattataaaattagctcctactattgtttcttgtggatcgactccgtggtgagcgaaaaacctggcaccttccagataaatatacatagatgttgctttcatattttttcagtttgtataacaaaggtagcaataatcggtgagatatggaaaagtagagcaaagttattgagaaataggctttttaagaaaatagcttctgcaactgaatgacggaaaaagccaagtctgaaccaagttaggacttcgctacgttaccgattcgttaccctgcataattggtggtatcggaacttaggaagaatagagaaatacgctattatatagtgagttactgacaactcatgcaacaatttcggtaacggatgatagttgcaccattcctctgcgatttgcgtatcgacgaaggactcttcaccaagtaattttgaaaccaaaaaagttcagaaagatgaagagtacattttcagttatcttctacctcaaacggcaggtagtgaaaaaagacggtacagtgcccgtcatgggacgtatcacggtggacggaagccagacacaattcagttgcaagctgaccgtcgatccgaagttatgggacaccaaaggcgggcgtgtcatgggcagaagcacagcggcactcgaaacgaaccgcctgctcgacaaaatgcgcgtgcgcatcaacaagcactatcaggaaatcatggagcgtgacaactacgtcacggcagaaaaggtcaagaacgcctttctcggacttgaacaccgctaccataccttgatgcaggtattcaaccggcataatgaggactacgagaaacaggtggtggcgggcatgaaagccaaagccacgctttccaagtacaagacagtgtacaagcacctgcaagagttcctcaacatccgctaccatgtgaaggacatcgccttgaaggagcttacccctgcattcatctccgacttcgagatgttcctccgcacggacaagcattgctgtaccaataccgtatggctgtacgtgtgcccactgcggacgatggtgttcattgccatcaacaacgagtggctcacgcgcgacccgttcagggagtatgaaatcaaaaaggaggaaacgacacgcagcttcctgacgaaagacgaaatacggcagttgatggaagggaaactgaagaacgccaagcaggaactttaccgcgacctatacctgttttgcgcattcacgggcttgtccttcgccgatatgcgcaatctcacaaaggaaaatatccgaacctacttcgacgaccatgagtggatcaacatcaaccgtcagaaaacgggcgtggtttccaatatccgcttgcttgacatcgccaagcggattatcgacaaataccggggattgtgtgaggacggcaggatatttcccgttccccactacatgacctgtctatacgggatacgtgccgttgccaaacgttgcggcattacgaagcatatcacgtggcatcagagccgccatacggcagccacgacggtgttcctctccaacggcgtgcccattgaaacggtgagttccatgctggggcacaaaagtataaagactacccagatttatgcgaagataaccaaggagaaactcaaccaagacatggaaagtcttgccgccaagttgaacaccattgaggaatttaccggatgtaacatctaaagcagaacagccatgaaacgaggaatcattatcatagaggacaagaaggtcagcgtaaccggtaacgaggtatggatgaccgccaccgaaatcgccgggctgttccatgcaggcgttccggcagtgaacgccgccatcaaagccgtccgcaagtcggacgtgctgaacgactatgagatatgccgctacatgcggcttgaaaacggtttgtatgccgatgtgtatgcccttgaaatcatcatccccatcgccttccggctgaacacctactgcacgcacgtgttccgaaggtggcttgtggagaaggctcttgccaaagaaaaacagcaggcatacgtaatgctcatccacaaggcaaacgggtattgctgaacacacaaagacattaatgatgccgacaacagaaagaggaaacggacagctccacgactggggttgtccgtttcctctttgtgcatacagccgccttatctcacactttcagcggttttctataatttgcttccaacacttcgcgcagtcccgattccggataaagcacctttcctgccagcaggataaaaggcaatatcctgttgttgcggtattcctgcaaggtgcggcggctcacgcggagcagttccgccacttccttgtccgtcaggtatcgctccccatccaatggcggacggtaactttccaaaaaatcggagagccatttggattccttccgcatcttttgcagcaatacggctactgattcacaatccatcgtgataacattgttgtcttcgttcataatcatatccgttttaagtcagacaaggctatctgtcagtggggcaaatcgtaccgataagcgggatgagccttttcacatcttccggcttgtagtaaaaacggaagccgatttgcgaataaccgataaagcccctgtcacgcagtttctgcaacgtgcgttggctgattctcaactgcccacaaacctcttcgcccgtgagccacttgccgagccttttggcatcccccttgcgctgcaaggcggcgaccttctccacgaaggcatccgtttgtgccaccatttcctcgaaggtctttttctcgatagatactatttccatatacaaaacgatttttgaatttgccgcaaaggtaacggcacgggctgaaatgcccatcggttttgtctgaatggcagcttgttgcgccgattgtccgggttgcggagcctttttcataaaaatcttacgtgagtcacgtagtgagttgttaaagccgcccttttccattgccgaactttgccgcagaaacaataaaacaagcgcatatatgaaagtgataacgattgaaagttccgcataccggactatgctggaacagatagcggagatagcaggatatgtccgcgaagcgaaagaagagcgacggcggaaggaggcggaaacgaaagaccgcctgctcaatacggcacaagccgccgaactgctgaacgtgagtacccgtaccctgcaacggatgagggacgaccatcgcatagaatatgtgatagtacgcggcacttgccgctaccgcctctccgaagtgcaaagactgttggaaacaaataccatcaggaacaaggaagaaacagtggaagccctgctgcacaactattcgctacgcacgggaagcaagaaaaccgacaaaggaaggaggaaatgatatatggaactgcttacccgcaacagtttcgagggatggatgcagaaaatcctcgaacgcctcgaccgtcaggacgagctgctgctggctatgaaggcgcaggggcaacaaccgccgtccctgtccgaaggcatccgccttttcgacaatcaggacctgtgcatgctcctccagatcagcaagcgcaccctgcaacgctaccgcagtgagggcgcactctcctacaagaccttgggcaagaaaacctattacagcgaaacggacgtgttggacttcctttccaaacatgtgaaggacttccggcagaacgacatcgagttctacaaggcacgcatccgcaatatgttcaataaataaccaattaaaatttaatcagatggcaaagaaaaaagacgaaaaggacgtgctgattgtccgtgacgagaagacgggcgagatcagcgtggtagccggactgaatgcggacggcacgcccaagcgcacccccgccaaggcggagaacgcgcagagtttcctgcaattcgaccggcacggcgacgtgctggacaacttcttcaggaacttcttccgccagtgcaaggaacccagccgcttcggtttctaccgggttgcggcagagcaggctgacaatctgctggaagtgatgaaggagctgctgaagaaccccgaagcctacagtgaactgcttgcaccccacaaggtggacacttccggctacgagcaggaagtgcagaaagtgcaggaggaacagcaacagcaaaaacaagaagaacaacaacccgatcaggaaaataaagaaaatcaggaagaacctaaaaatcaagaagaaatggaacagaaacaagaacagaatcaggaagccccgcagcagacgcagggcagacagggctaccagcccatcgacgagaacagaatcaactggcaggagctggaagagcgttggggcgtgaaacgcgacgagcttgaaaagtccggcgaccttcagaagatgctcaactacggcaaatcagacttggtgaaggtcacgcccaatttcggcggcgaggcattcgagctggacgcccgcctctccttcagaaaggacggcgagggcaatgtcagccttgtgccgcacttcatccgcaaggagcagaaactggaagagtacaaggaacacaagttctccgatgaagaccgcaagaacctccgcgagacgggcaacctcggcagggtcgtggacctcgtggacagggaaacgggcgaaatcactccctcattcgtcagcatcgaccgcaagacgaatgaaatcacggatgtcccggcaagcaaggtgcgcataccggagcgcatcggcaacacggaaattaccaagcaggagcaggacatgctccgtgccgggctgcccgtgcgtgacaagctcatcgagcgcaaggacggcaggaagttcgtcaccaccctgcaagtgaacgtggaacagcgcggtgtggagttcgtgccgggcaccggcaggtcgccacgtaccgcacagacgcaggaagccaaggagaatcccacccaagcacaagcacaagcgcaggcgcaaggtacggaaaatgccgccggcacgaacaaggagcaacgctgcaacacatggaccaacgaggacggcagcatccgccccatcagcaaatggagcaatgtgaactttaccgaccagcagaaagccgactacgtggcgggcagagccgtgaggctggagaacgtgaccgacaagcagggcttccatgccacgatgtacatcaagttcaacccggaaaagggtcgcccataccgttacgacaccaatcccgacaacgcgcagcaggtcgccccaagcaacgagagccgcacgcaggtggccgtgaacaacgagggcaagaccaacgaggcgaccaagcacctgaaagaaccgttgcagaaaggacagaccgccccgaaagacaataaccagcaacggcagcaggaaaatcaacaaaaaaggacgggcaagggcatgaagatgtaatatccccaagcccgccactaaatccaaaaaatccgaagtaagaaaaaaacaatcaaacaacaagaaaaatgaagacaatcattgcagaaaagcccagtgtggcacgtgaaatcgcccgcatcgtgggcgcgacaaagagagaggaaggttatttcgagggaggcggctatgccgtgacatgggcgttcgtgtagatactaattgaaaagtgcgctgtattctaattgaaaagagctccatccataacttgttacaaaattactataagtttaaaatattcatttatcttgtctcattttttgtgtttccttaagcctataagacagtccggtcatattaaccagataagctttatgtgtaagcctgtcaaccattgccgccacaagcaccttgtcctttatgatttcattccatctgttaaaagccaaattagtagtaatgattgtagccttttttccggctcttaacgacaggtggttaaaaagcagttctcctccttccttgtcacaactgacatatccgaactcatcacagatgaccagatcgtatttttcaaaccttaattgtagcgtcctcagtgtctttgctgatttagcctcccttatctgggtaagcaggaccggcactgaagtaaacaatacggtaaagtcctgttggcaggcctttattcctaaagccgtagcaatatgcgtctttcccgttcccggatttccatacaggaccaggtttcttccctgtctgatgaagtccagtgtctccaattcaggtaatattacctgtgcctctttgggcatgtcttccataacaagctcatgcagatacttcatttgtggaaatcccgcagatcttatccttgatcttcttctacactcccttctcctggcgctttcctttccaagcaattccgtcaagaactgcagatggttccagttttcttcagctgccaatgaaagggtgcattccagttcctctttaaaggccagaagcttcagttctgcagcatagtcataaatggtttctttttctgatttcatatattataaacttaaatggttggtattatatcatgcacttcattgtatcctgtcatgagcgccgtgatgccttcaagcatatccacagcttctctttctatattctcctgttgtgccgggagaacaggcggttccatggtttcttctgtctctccctgtacgctaccatgcagcatggcctttacctggtccggagatatctttctgacaccacgtccggtcagctccttgcatgccgtgacaatgtccgttccggaaaatccattttttcgggcatagtccagcaacagaacaaacgtcctgttgtcctccttgaaatggatgtcatacagccttctcagttcttccggtgctctttgccaaaccacagagtggggcaatgcccccggtttacgggaaagtgtacgcaaatagtgctccagcttgatgcaccagtctccaccgcaataactgcgttgatgagaggccactttctccttcccgtgcaggatgacgattttttcactataaaccttgacatgtactttttctcccacaagagaatcaggtacggaataatgaacatttttcatgctgatagttgaccatttatccacaatgtactcatagacctcaaaacagcccagattaccgggaaaaggcttcagcgatgacaggtcagcttccagacgtgatgttttctccgctgttgaaagactgccttgctcgttgttgacctgcatacatacccggtttaaatgctcctgggcagaatgtatatcaccaaaatggtctgtcaggcagaaagctttccttctgacatattccacgctgcgctccacatgtcctttctcccatccggcccgtacattacagaaacggtactcaaaacaatagaaaccggacatcttcatcaaagcttctgtaggtttcttatcaccaccgacaaagctcttgacggctacacgcatattgtcatagaccatcatggcggggacaccatgtatatccctgaaaaagttacggtgggattccatgaaggcaagcgtattctgatgcctgaaaagataggcgtatctgccattgctatgcccgaaagtgaatacggccagataaaacttggttttgacgccgtcaataaaaagaagaacttcaccccagtcaaactcggcaatgcatccaggctcatagaacaaccggataaaggcttcgctctttttcttctctttgtatgactctatattttttatataactgcatactgtggcgtaactgatggtgtatccttgagataacagaaactggtggatatcctttttcaacatgcgctgtttgcgaagtccggtagctatcttaacggcattcttcttcaggcaaaatcctatcttatccttaatctcttgtgtgagccggcgaggacggcgtctggaactgtcatacctgggctggatggtaagcaaatcactcaaagcctcttctggattgtccgtgcggatggctgattcgtactttgaaagaatattgtcaacggtatgacggctgacatgaagttcacgagagatacgccgtttgctataaccgcatactctatacatgtgtattattgattgtctttctaccatagtcttcattttacctttgcatttggattatacaaaggtcattatacttatcctatggtggcgcaattttcaactggaatattggcgcacttttcaattagtatctacacattggctgtggaaaaagatacaatttcacaaaataaatttgatagcgagatagatatccgtcaggttgagctagaacatgccaatttgatttttgatgatcgtaatacagaggtttattcacgtatagatgatgttgatttgcgcctaaagctggcgttgacaaaaggagtttcttcattgggagtagaatttgaaaataaaaatattcttttttggcagcaaggtgaattattgattaataaagtagcggcttccttgcagactgatattgagatagacaggtctacggcattgtggacattgaaaaatacaggattgactataaatggtatccggctggatgtaaacggtgaattaaaacgtgatacagttaccaagatggtgggtgtgaacttgaaatatggactacatgcaccttccatggaaacagtcatgaatatgattcccgaggcttatgtgaaacgtggacaaatttcggcaaaaggtgaggttaaggttgatggaacattggaaggtaattatggaaacaaacagcttccggcggtatcattgaatataaagattaatgatgcatccgcccgatatgaaggacttccttatggtattgataattttacggctgattttgaatcgtatattgatttgatgcgtcgcaatccttcatttttgaacttgaaaattcttcattttgagggagcacataccaagattctagcagatgccaaagtggaggatttattgatagatccacttataacacttcatactgaatctacagttgacttggatgctttagctaaaactttccctttgcaggaaaatgtaaccatccgtggtaaattagatgcgggtttaaatttaaaatgtcgtctttcttctttgaaaaagcaggatattggacgtatcaggttagggggaagattggctttaaaggattttgagttaaaagacactgctaaagattttaattttttaggtaatgccgatttaaaattcagtgatagtgaaactttgcaggctgaattggatatcagagaaataatattgaatagtaggaaatttgtttcagagatagatcggatgaaagcgaaggttgtttcaaccaatcctcaagataccacaaagattgtcactttgcaatgtgaattggaaatgaataaattgcgtgcgaatataggagattcgcttaaaatatatagtggcaagactactggaactggcgaacttgctccgaaggaacaaaattcggcaatgccgatgattagcttttccatgcgtacggattctcttttctttaatgccaatgaaacgaagttggcgttaggcgtggcaggtattaaggcgaaattggaaaagaaaaatgattcgttatggatacctcggggaattgttggttttgataggttgttggtacatactcctgaatttggtttacctttacgagtacgtaagacagctgtaacagtagatggtccgaaaataacattaagaaatgcctctttgaaaatagggcattcagatatggttgctaccggtgaggtaatgggattatatcgtgcgatgactaaaaatgaaactttaaaagcgcgtttagcaatctcttctgagatgattgattgtaatcaattgataaattcattctctttatctgaagattcagtatctgtggcggtgacagacacagtgtctccaacagaaatgaagttgtttgtgttaccgggtaatttggattttgaattacagacagatttgaaaaaagtagtgtttggaaaggtggaatttgaagatgtgtgtggaaaggtagatttgaaaaatcgtacattatatttaagaaatttggaaatgcgtgcattggatgctgatatgaaggcggttatggtatatcgtgcggattcagtcagaggaggatatacaggctttgactttaaaattagggatataaatatagctaagctggtagattttataccttcaatggataccattgtacctatgctgagatcttttgaaggaagggttcagtttgatgtggctgcagaggcacgtctggattcaaatatgaatattcgtatacctactttgcgttcggccatgtatataaaaggggacagtttggtgttgatggatggtgagacctttgccgaaatttcaaagatgttgatgtttaaaaataaaaagaagaatgtatttgatagtatttcggttaatgtagttgttaatgacggtagtgttcttgtttatccatttcaagtgtctatagatcgttataaagctgctatagggggagagcaaggactggatatgaattttaaatatcatatatccattttgaaatcgcctttgccttttaaggctggagtgaatatttccggtaatctggataagatgaaaatacgtgtaggtaaagccaaatataaagatgatgtgactcctgctgccattcataaagtagatagtacgcgtatggatttaggaaggcgtattgtggaacggtttcatcgtattgtaggggtaagatagaaaagggatttattttgtttatataaaaaagctccttcacgaaagtcatgaaggagcttttcctttgtgttgttacattatataataaaccattatccacatctcgatgtgccacaagtcttgcagatcaagcatccttcttgatatacgagagtttcatttccgcaattgggacatttttgtccttcggcactagtaccatctgttacatattttttcagtgctcgttctacaccatttttccatgtgttaatgttttcactgtcaagttgcagagaatctaccagtttgataacacgatcaataggcattctccaacgaagtacacccgaaatcaatttagcatagttccaatattctttgttgaacttttcagacaaaccttcaatggttgttttgtatccacgtttgttttcaaactggaaatcatatcgtttgttgccttcttcatcaatgtttttgatgatgcgtccggtagtgaccgatttgggcaatgaaataccttcttcatcatcttgcagaccggtaaagatttcgtatggatgtccatccaacaagcctacaaatgcaacccatttttctttgttgttttggaaacgtactacttccgcttccagtactttggggcgcacttctactaccgtaggtggtttgcaagggggaagttcttcttttttgtctttcttgtccttttgggtagaaagtaaaactccggagcgggagccatcacgataaacggtacatcctttgcatcctgaacgccatgcctctacatacaagcggtttaccaatgcttcatctacgtcattgggcaaattgatagttacgctgattgaatggtcaacccatttttggatacgtccttgcatttttactttcatcagccagtctacatcatttgatgtggctttataataaggtgacttttctaccaatttgtcaatttcttcttgtgtataacgcttggtgggatcgtaaccgtttactgtcatccattccacaaatttatggtggaatacaatatattcctcaaatgcatctcctgtttcatctacaaaatctacgtgtgtctgaggatcattcggattgacttttcttctacgtttatacaccggcataaacaccggctctatgccggaagtagtttgggtcattaggctggtagttccggtgggagctatggtcaggcaggcgatattacgtcgtccgtattttttcatctcctcatataattctggatcagcttcttttaagcggttgatgaacggattgtttttttctcgttcactgtcatagatagcgaatgctccacgttcttttgccatgttaacagatgaacgataggcttccagagcgattgttttatgtacttgttcagaaaactctgttgcttcttctgttccgtagcgtaaccccatagcggcaagcatatccccttcagctgtgatacctacgcctgtacgtcttccctgtccgctctttttataaattttttcccataaatgtttctctgcttcttttacttcctcactttcgggatcggaatcgattttagctatgattttctcgattttttccaattccaagtcaatgatgtcatccataatgcgctgggccaatgccacatgctttttgaataagtcgaaatcaaagtaagcctcctttgtataagggtttactacgtatgagtataagttgatagctaataagcgacaagaatcgtagggacacaggggtatttcaccacaaggattggtagaaacagtacgatatcctaaatcggcataacagtctggtacggattcacggatgatggtgtcccaaaataatacaccgggttcagcagacttccatgcgttatggacaatctttttccataacgcagatgcatcaatgtctttcgtgaaaacaggttgatcggaatctaccgggtattgttgtttgtaaggagtgccatttacagctgcctgcataaatgcatcatctagtttcacggatacattagcaccggttactttgccttcggtcattttggcatcaataaatgcttctgaatctggatgcttgatggatacgcttaacattaaagcaccacgacgtccgtcttgcgctacttcacgtgttgaattggaataacgttccatgaagggcaccagtccggtggaagtcagtgctgaatttttaaccggagaaccttttggtcgtatatgagataaatcatgtcctacgccaccacgacgtttcattaattgtacttgttcctcatcaatgcggattatacctccgtatgagtcggctgctccatcaattccaatgacaaagcagtttgataaggaagccacttgaaagtcgttcccgatacctgtcatagggctaccttgcggaacaatgtatttaaagtgatccaataattcgtaaagctgctgtgcgtttaacccgttctgatatttagcttcaatgcgggctacttcatttgcaatgcgccaatgcatatcttcgggagacttttcgaaaatgttcccgaaagaatcttttactgcatatttgtttacccaaacccttgcagcaagttcatcacctttgaagtattgtaaagatgcttcaaaagcttcgtcataggtgtacgtttgtctttccacttttatttttagatttactgtaatatcaataagttgttttagtgtagaagttacaactcattataataaaagtttcggcaaagctatatatgttttttcaattaacaaaataaaaagcagataagttttcaacaaattgaaagttatccaagaatatttgttaatttattgattatcaaaagatatatatgcttgcttatttgtagaagttttctgttttgaaaattttgatggaggggatgagtgattgactagttgaaaaggccagattcttagcatataatattttgcaaaaaatgcattattactcttttctttttttatctttgcaagaaaaatatatatggaatcgataaataatagacggacgatccgtaaatataagcaggaagatatttctgcttctttgttaaatgatttgcttgaaaaggcgttccgtgcttctacaatgggtaatatgcaattatatagtgtgattgtgactcgtgacaagcagatgaaagagagattggcacctgcccattttaatcaaccgatggtaacaggtgctccggttgtactgactttttgtgcggattttaaccgttttagtaaatggtgcagagagcgtaaggcggtaccgggttatgacaatcccatttcttttttgaatgctgctacggatgcattgcttgtgactcagaacttttgtacattggctgaggaaaatggattaggtatttgttttttgggaacaacgatttataatcctgatcaaattattgatatccttcagttgccggaattggttatgccggtggctactattacagtaggatatccggatgaatgccctccacaagtcgatcgtcttcctatagagggtattttgcatgaagaattgtatcatgattataccaaagaggatattgatcgtatttatagatataaagagtcacttccggaaaatcatcagtttattaaagaaaatcataaggaaacactggctcaggtatttactgaggtcagatacaagaagtcggataatgaatgtatgtctgtaactttgaaagaaaccttgaagaaacagggttttgagaagtgaattgccgggaactatcaatcttaaaacagaggtgcgcagagggaaataaagaaaatgccctttgcgcacctctgtggttttattctatttccttttgagagaagcttcaatttcctcaatatccgctttaaatgctttgtcaacctctacttggtcttttactattttgcaagcgtgcaatacggttgcatgatctttattacctattaatttaccaattttggaagaagaggagtctgtatgttttttggccagatacatagctacctgacgtacttgtaccacttctctttttcttgttttagtatggatggcagattcttctatctcgtaatggctgcatactttctgtatgatatcttctactgtgacaggcttgctctcacaacagcgtacagcttttcgtacaattctttcagccaaatccaaatcgacatcacgcttgaaaataatggattgtgccaaaagtgaattaatgatgccctctaattcacgtacactttcatttacgttttcagcaatataattaattactgtttccggtatattcaaaccgtcacgacgtattttattacgtaagatattctttctcaattctacgtccggcttttccaattcggccactaagccccatttaaagcgggtcagaaggcgttcttccataccttgtagcattaccggcgcacggtcagaagtcagaataagttgcttaccgttctggtgcagatggttaaagatgtggaagaatgtgttctgggttttggttactccggcgaattcttgaatatcatcaataatcaaaacgtctatggtttgataaaaactaatgaaatcattgaaatgattggtacgaacagagtcagtgtattgcacctgaaacagatgtgctgatacgtacaatactcttttttcaggatataattccttgatgcgggtaccaatagcattagtcaagtgagttttgcccacaccggatggtccatacaaaaacaaagggttgaatgtttttgccggatttttagctacagtttctcctactgtacgtgagaactcattactatttccttttatgaaattctcaaaattgtaatttggattcaaatgtgggtctaaatcctgcggagccggtgcctgcattggattaggtgccttgttaccatctcgtataactgtttgtgtgggtagtgctgaagagcgtttgcttccctccatgttaacagttatatggttggtcttatcggtcaagatacaatacataagctgcgttccctccccaatttctttatatagggcagcgcgcagcaagtccacaaacttttcttctagaaattcatagaagaatgggctggggacgccaattgtcagtgccttgtcctcatatttaagcggtacgataggctcaaaccacgttttaaaggtcgtttctggtacgttgtctctgataaggttcaggcaacgaccccataaaacgacgtgatcgttttcaatcatatgaaacatttattataaaaagcgaaacttctacaatgcaaatttcgaaatgaatttctgaaaaaacaaatcgcttttttcttgctttttatttttaaagagtaatatctttagtttcagttacttataaaaacctctatctaaaggcttttgaaagattcttgttgtttgataattgactgattcttagatgactatcagtcaaaataggcttttatttattttaaatgaaataagtctacatggtatttcttccctatttgcagtcatttactgaaaataagtggaaaaatggttgagtagacttatttagaatatttttaaattagcaaatatgttacttatctttcttgccaaacaaagagaaatgtacataacgtttaggatgcgctttcaaatcctccaataaggttgcagcgtttgctgtcgtcgcactcaaattttggtagaaagtaggatcattgaatagcaatccgatactgttgtccttgcgattgagtttttctgtcagcatttgtacattatataaagtggagtctattttattgaacgttgaagcataatcaatacctttcaaattgtcgctgatagcaatgaagttatcagcaattgtgtttaattttccagtaagttgcggaagatccttttgcattaacatgtttaattgacgtgttgtcacatccagattggctgtcagtttttctgcgttgtgcaaggttgcactcaatgcaggatcagctaatattttatttaatgaatataggatagaatccattttgggtaacatctgctctatttgaggaactagcttttcttcagcggctcccatgagccccgcattcgttttgccgggcagggtatctcccggttgatagtattctgtagaattaaagttaaggagtaagttcatctttaccgttcccagcatttctgtaaccagttctcctgtacttcctttggggatacgcatttccttgtccacttccacttctactgtgacatgtcccggttttgcatagttgtaattgatatttcttactgtacctactttataaccattggcaaagacggggcttgatccggctaatccgtttatatttgtatattctacataatagtaattggcagattggaacatatttattcctttcaggtagttgataccaaagatcagcatagccaatgcagcgatgcctattaatcctatttttacctctttcgtcatttcaattataccttttatattatctattctttttaaattctttgatggcttcgttcacattcattttctctccgtttttgaaagcgataatgaaagcgtccttaaatttaggagtaatattacgtttcatgcgtagtattttattataatccgtattttctccgtaagtatatttataaagtcctttttcgcggtaatagctaacaggtgatacacctttcagttgtttgcttcctttgggcaatattttgtttgataccaatatttgtattttaaatacaggcttggcagatgttcgggcttggtcgcctgtgatctttttttgtgtggcaggtacaggctttttggtaaccttgtccggttccgttgcagtgtccggttccgcagtttgtatttctattcttgattctttcggtttgttttctggttccggtaattcttgttcttgtactctgctgcggccgatgggggcgtcatgttcgcgcttgtaattgaggaatgctttataaatgctgttagataacgccgtagtgcctgcatcggataaaagatattgttcttcatccggtgttgagatatagcctaattcaaccaaaacactaggcatggaagtggcacgtagaactaggaatccggcttgatgtactcctttgtctattcgtttggctgtattcttgaattgtttttggataagagtggctaattttacactcttctccatatttttgtcttgtacaaattcaaaaataatatagctttcagaagaatttggattgaatccggcataacgttgttcataattatcctctatcaaaataaccgagttctcttttttagcaacttctaaattttcttcagtacggtggagtcctaacgtataagtctctgctccccgtacagttctgccacgggctatggaattagtatgtatagagatgaataaatcggccttggcattattggctatttgtgcacgacgatccaaagggataaagacatctgttttccgggtatatattacctttacgtcattacagttattttggatcagttgtcctacttttaaagctacgttcagattgatgtttttttcttttccacgtctgccgatagcaccgggatcatgtccgccatgaccgggatcaatgacgactacaaagtcctttccctttgccgccaggcagaaacagggaaagaccagccacaggctacacaacaggaatattattttaagtctatcggttttcatatcaattaagttgcaaatgtagcgatttttagtgaaaactcggcttttgtctttaagttttgcgttttttattcgaaacttgccacaaaacccgaaaaaatagacgagtgtttggactaaattcttttattttgtattctgaaataaatattgaaagatggatttgtttaagtttatgaagaattggacgttacctctagcgatgcttgcaggagttatcggttattttgtttttgccaacttcacttttctggagccgacaaagccatttatgaatgggttgatttcttttttaactccttccttgatttttgcccaattgttgcttacattctgtaaaattgaaccaaaagagttggttcctagagtatggcatggctggttgttggctattcaagccatttcttgtggtattattgcgttgttgttaatattttgtccgatggatgaatcttataaggagatattcgaggcggctatggtttgtcttatttgtcctactgctacggcagcggcagtaattacgggaaaactaggtggaagtgcttccagtttgactacttatacattgctttcaaatattttggctgcaatagcagttcctttgatatttccattggttgtatttataaccatagaacaaccaaaactaatcagaaatatccgagtgtaaatctttaattaccagcatattctaaaatttaacacttttcggttgccatttgtcgcttcccaaatttccacatatttttgagacgtatttctgacgtggagaatttgcggggcttgttttttgtcacaccgtgcagacagttgacaagggtttacaaccgtttacgacaagcgacaataaccgccccgatatgcggaaacagtcacactgtgtagaaaagcgacaatggttgacttccgttcacatccgtttaccatttcagagatataggattgaagaaatgaaccattaaacgataaaacggtatgaaagcaaccagaaaatgcagtttttgcggcaagtcctttgtaacccgaagcggtatgcaaagatattgcagtgaggcttgtcaggcagaagccaaacgagccagagtgatgcagaagaacaacctcttcaaagtcgcccaacccttgatggagatacagcatcaggagtatctcaccttttccaaagcagccatcctcatgggctgttcccgacagtacatttacaaacttgtagccatcggcaagctgaaagcctcacgcatcagcaaccgcatggcattcatccgcagagccgacatcgagcagatgttggagggcaatccctatcaccgcatcctgcccggcaacacctccacaccaaggaaatcatcttcatcttccttacctgccaaaagagaaaaaagggaaaaggaaagcgaagaagtgttggacttctattcgggcgaggaggtgatgtccctttttaaggtaaagcagtcatggctttacacttccgccaagcgtaaccatatccccatctgccgtatcgcaggaaagaactattacagcaagaagcatattgacgagtttttcggtgtggcagttgatattagcgaaattaccgactggctactgaccgaggaggtggaggaactgttcggcatgaagccgaccgcactccgtgcctacacctatcgccataagatacccactaaaagagagtacgggcgtacctattactccaaatcacatttgaacgaactccgcagaactgaccttgtgaacgatgaacgctactataccgttgagcaggtgcagcaaatctatggtctttcgtcagccaacatctgccatatcgtcaaggtgaagcacatcgaaaagataaaggtgggtgtgaaaaacctgcttttgcgctcagatgtggagcgtgtcatggctgaaaggaacaaataaccgtgaaaaatcgggattatcgaaaattatttcaaaatgatgtatcgtggaggtattcacggatatttcacgttgttcctttgccatcggaaacatggatacaactccaaaatgtatacaaccaattaaaacataattattatgagtaaatgcaaaacagttaccttgcgtaagcgcaagattaagaacgggacacagtattcactatgccttgactactatcccggctaccgtgacaatgtcaccatgagagtgattacacgtgaagccttaggaatttacatcttcgccaaacctgcaaaccagcaggaacgggacttcaacgcacgcatgatgaagaaagcggtcatcctgcgcaaccagcgctacgaagccattttcaatgaaaacaacggcttttttgacaagaccaagatgaagggcgatttccttgcctatttcaaaggactggctgaccgcaagaatatcaagtggcagcacgtatacaagcatttccagcggttcgtgaacggcaaatgcacctttgaggaggtggatgtggatttgtgccgcaagttcatggaatacctgcttgatgcaccccaatccatccacaccaaccaaaagctgcacatcaactccgcagcaggctattggtcaactttccgtgccgtgctgcacaccgcttaccgtgacaggaagataaaggagaacccaaacggcttcttagaccgcatcgagtgcattcccaccatcagggagcatttgagccaagaggaactgatacggcttgccgaaacaccctgtgaggaggaggtcttgaaaaaagcttttcttttcgcctgtcttacgggactgagaaagagcgacatcagacagctcacgtggcagcagatacaaccatacaccaacggcaggatgttcgttaccacccgtatgcagaaaaccaaagaaatagtgcataaccccatcagtgatgaagcctatggactgctgggagaacggggcgagggacttatctttgaggatttcaaggacaagatgctgcaaggaccactccaacggtggctcacggcagcagggataaccaagaaaatcacctttcactgtacccgccacagcttcggaagcctgcacgtggaaatgggaacggacatggctgtcatccaagcctatctcggacataagaacattaccaccacacaaatctattccaagatagcagcgcagcagatgtgtcaggtggtggacaagataaccttgaaacgcaaggaggcataaatgtctcacattgacaggtattcagaggggcggttatggctacaaggctataatcgcccctctatgtttttggcttgatgccaccatttataagcccctcagagtatgaaacagagtatgatatgatgacatttcgtgaaatacattgaaaaagaccgttctaaccgcaaataacgggcagtaattgggaaaaatagcattaactttgcacaaaataatacaggaacattcaatctctcaacgaaatatggaatcatcaatcaaggacaaatacatcatcttgggctttgtcggcttcgccatcgtcctaatatcttccattgccacgctggtaatagcggacagcttcaaccaagacaactttgtcaggtggatagtattcgtatgctgtaacctgttgggatggttgctctatctctcctttcagacacttatctttgatacatacgaaatctacaaaatcaagttcggcaagaaagaaacgattgccgaagccatagaggtgcaggaagaactgtcacaaaatacacttgaagaagccacatctgtgcctggacctacatcagtccctgagcctgtacccgaatcatccccgacaaaagaagagacacttatccaaacacaaccgatagagcttactatcgccccggatcttcacgaaaagaaccgtgccaattacgcaagcagagagcaacgggaaaaggaagagcgcatccgcatggtcatggagtattgccattattacctgcctcgcattgccgaccaagaaaccgtgaaccacatctgtactgaggtggacaaatggatgaatcttaacacttataccccgaagcccatacaaagaccgtttaccaaagacatcaacaacattccactccgtcacttcgtatggaatatctctgagcgtttcctgtacaagagatactacaatggggataaccgtgccaagttcatcaaagcccttttcccgaaatcgtttgctgatacagacttatcaaccatcaagaatttcaaggtagagccgttaaagacggaaattcccattgatgaacccgaaaacggcaaacttgatttccactatcccgaggattatgtgcggaattaggataatcacgacaccaacgacaaccatccggtaactcataaccgcctgttttacatcgtttcccgagtaattttacccgtcatttatggctgggcttaattattcgggaattattttgcaatgacgtgtcgtggagatattcacggatatatcatttcagtcctttgcgccaagtcttacaaaagagacgagtacgcgaatggaaaaatcaattcttaccttcaacgacctccccgaggttgtcgctcagcttcgagacgaagtgatgagcctgaaaagcctgctcgccgagcagcgcagtgtgaacaatgccaaaacggtggacacccacgtgcccatgtctgtggacgaggcagcagagtatttaggtatccctaagggtacgctctacatgaaactgtcagaagggacaatccctgccaccaagcccggcaaacgctattgcctttaccgtgacgaactggacaagtggctggaaaccgcccgaaagaatcccataccgttgtcagacgaggaactgaacaagtccttatcctcttcccaccgtcgcaagcccaacccacgtaactggtgaatgatatggaagaggataagaactatatcaacctgatacgtggcgacctcacaaaagcatcccaagcgcataacggtatgcccgacagtgtaggcatgatgaatatcaagacggcaaaccaaaccattcttgaagcatcgttattgcctacgccccgtgcgctgtgggacagcttttggtacgagggggaactctcctgcttgtttgccgattccaacgtgggcaagtccatccttgccgtgcagatagccgaccgcatcgcccgaaccgacaatgtgctgtatctggactttgaactgtccgaaaagcagttccagctccgctataccaacgagcatggagagctctacacctttcccgacaaactctatcgggtgtctattgactgcaaccagcttttggatgccaactttgaggaagctatcataggcggcattgaacagatggctgtgcagaccgactgcaagattttcatcattgacaatcttacctacctgtgttgcgccatggagaaaggcgatgccgcaggacggctgatgattcagctgaacaatctcaaaaagagatatgcgctctctatccttgtcctagcacatacgcccaaacgctctttggattgtcccatcacatccaacgaccttgccggaagcaaacggctctacaatttctttgacagcgtgttcaccattggaaaaagtgcccaagacggagggcttcgctatgtgaagcagcttaaagtgcgctatggcacgttctctcatgatgcggataatgtaatcgtttacgagattgacaaggtggatgctttcttgcagttcgtgttcaggggctattccacggaaaaggaacacttgaaaaaattgggcgacaatgaatcaagccaaagggattgccaaattctgcaactctcccaatcgggcaagtccgtcagggagatagcctcacaggtgaattgtggcaagtccaccgtaaaccgtatcatccagcgcagcaaagagagtaaaaacgcaggtgtcccaagtgtcccactgtcccaacccttagagtgtgggacaatgggacaggatgggacagccgacaatcaaccatcaaaaacggactaagctatgggcaattattcattacagaagtataaaggaacggcaacacggcatacctgccccaaatgcggagacaggcattctttcgtctattacgtggacgaaaataatgtgccgttgcatccatcggtcggcagatgtaaccacgaaagcggttgtgggtatcactacactccgaaagagtattttcaagagcatcctgaacacagaactaccaatgatttctcttttgacaggcaaagagcagagcagaagaaagtgaagcagcaaagtaagccgacagccatcggctatattccccctcactatgtggagaagtcgcaaagcgagcgtagcaatttcttccgtttcctcttcacactccttacttcctactatggcgacaaggcgaaagaggtgttgaagcggttgttggaggaataccgtttgggggctacccgtgacggctctgttatcttttggcagatagacaggacgggcaaggtacgcacgggaaaggtgatgcagtacaatcccgaagacggacaccgtatcaagggaggacagacatcggcagtgaactggatacacagcatattgaaaaagcagcgtgtgttggcagaggattggcaactatcccaatgccttttcggggaacacttgttgaaaacgcatcccgacaaggtggtggtcttggtggaatccgagaagagtgccgttatcggttctgctatcttccccgattatgtatggctggctacgggtggtaagagtcagatgagagaagagaaactccgtgtactgtcagggcgaaccgtgcttctctttcccgatgccgatgcttatgccgagtggaaacagcgagccgagagcatgtacttttgtaaggtggtggtttcggacatcatcgaaaggaatgccaccccgaaacaaaaagaagcccatatcgacatagccgattggattatctttcagatacgggagggcaaggtgatgagtacagccaaccacttggtcgaggctgagagaatcctccagcggatgatagagaagaatcccgtcctgcaaaaactgatagacgatttagaccttgtgctggtcggtgcatctccaatcggcaacgatgatgaaaaacctccctgacggaggagagcggaagccgtaggctggagtttgcagacaatggcttgccattgatatagcccactataactacacgctccgcttacgtagttgtgggctctcccgaggggattagggttttaccctaatgacccactcagggcgtttctcccctgagaacccagagcaaagagtgaccctctctttgcaatctccgcttatgggttgcacccctaagaaccccatgcgtttacggacagcggaaaagcaaacaataaagtacaaaccaaaaaacaagtatctatggcaacaaaatcaagcatacatatcaagccctgcaacatcgcatcgagcgaggctcacaacaggaggactgccgaatacatgcgccacatcggagagtccagaatctatgtcgttcctgaactatccaccgataacgaacagtggataaatcccgacttcggcagtccggatttgcggatgcattatgacaatatcagacagatggtaaaggaaaagaccggacgtgccatgcaggaaaaggagcgtgaacgcaaaggcaagaacggtaaaatagtcaagattgcgggatgctcccccatacgtgaaggagtgctgcttgtcaggtcggacaccacactggcagacgtgcgtaaattcggtgaggagtgtcaaagacgctggggaatcacaccgctgcaaatcttcctgcacaaggatgaagggcattggctgaacggtcagccggaagcggaagacagggaaagcttcaaagtcggggacagatggttcaagccgaactatcatgcccatatcgttttcgactggatgaaccacgaaacaggaaagagccgaaagctcaatgacgatgacatgatgcagatgcagacccttgcatccgacatcctgctgatggaacgcgggcagtcaaaggctgtcactggtaaggagcatctggaacggaacgactttatcattgagaagcagaaagctgaactgcaacgcatggatgcagccaaacggcacaaagaagaacagataaatcttgccgagcaggaactgaaacaggtgaaatcagaaatacgcactgacaagttaaagaagacagccaccacggcagcgacagccataactagtggagttgcttctcttttcgggagtggaaaactgaaagaactggaacgtgccaacgaaaaactgcaagacgaggtttcaaaacggaacaccaatattgaaaaattgcagagccaagtacagcagatgcagaaacagcatgatacgcaaatccacaatctcagagaaatgcacaggcaggaacttgacatgaaagaaaaagaactgtcacggctcgccagaatcatagacaaggctttcaggtggtttccgatgttcagggaaatgctgcgcatggaaaagttttgtgccatgctgggattctctaaagaaatgactgaaagtcttatagtcaaaaaagaagccctgaaatgtagcggtaaaatctattccgagcaacacaggcggaactttgatataaaggatgatattttaagggtggaaaatgaccctgacgatgaaagcaggctgaacctgacaataaacaggaagccgattgccgactggttcagggagcaatggcacaggcttagatatggagcaagagtgccgcaacaggaagaaagaaaaagtagaggattcaaattataatagaagcaatttgattagtaatctaaaagcactccgataacgattagagtgcttttagattgtttatcattaattatcaaagcaagtgcagtttaagattttactgaagtttgcattaataaagaatatactacagctgatatatgcgcaacatattgtgacgcttgtgattcatttcccttgaaatccttaacaaataccgctaaggtataactgatattattaggcagacatatataggcaacatcattgtgagctgcaagaacaccattttcattaacattacctgaacctgtcttatgcgctataacaaccccttctttatcaagaagtggagctgctatcctatctacacctgttttgcattcttttaacgtattcttaatgaaactttgtttctcatcatcgataagaccttcagtaaacaaacgattcatcaacattgcagcaccaagaggagatgtatagttagagtaagccttgttatggtcagccgacatttcctcttccgtataagctatctgaaaacttgaacgaggaatgagtgtggctataaaactatctgtttgagcgacattaaccatatccttaaacataaggttgcttgcattgttgtcactctgagtaagagtataacgcagcaaatctctcactgtcaatgatatgactggccctgaataatctttcagcataggactccaagtctttgggtcaagtttatccctatttatatttactaaggtatcaagtgaaattcctttattgtcaaagtcattacaaagagctaatgcctgatgaaccttaaacacactcatcataggataaacactcttattattgaccttaaccgtatctctgttattaacaataaccgccacaccaatttcgccaggacaagctgagacaatttgagaaatgctatcagtcaaaacatttgttaaaggaggatttgcgctatcttttgtcgctgatttatggaacaatgaaaataccaagatgaaaatgcaaactaaagctatactcaaaactacgatttgtttttttctgtttttttccatgtttatattatttatatttgtttgacgagaatatctttatttgccgacaaaggtacataactttacggaaaaatatgtttctaaaatatataaaaatatataaatagacagctgtggggaaaatgtggggaaaaattagataattaaaaaggctaaatgactggaaataatcacttagccttttaatccgtacccagacccgtacttcgtaattgctgcgcccatcattcaagactgtcaaatcgggtctttcctgtcaagccaatgatgcctatgcgtatgccaaacacatggattacggatttctcgttccgtgaacaaacactttatccgcaactctgctatgtggtgtattggcttaactccatttctatgggcaacacttttgttgcagatttcaagcagcttttatcgaaatacccatcagtaagaactcgtttattaggctttcctcataattgggaacaagagcctttgtggagataaaataattgccctgtttcttaaaaagcactggggcaaaccagctccgtctttaattgtttccaataaatggattgtttcaagcccctatagaaagagaacaaaaattcctgtgtgaaaattaatctacgacaaggagcaagcaaggagcaatatcaaacaaaaatcaatacctttgcagtacatatgagatagaccaaaacaaaagtggaatatcggaaacgaatagcaaggaaaagagaagaaacgacccaagttgatgtcctttttgagttaataatcaataaaagcgttaaatcttcaccttttagaatgtgcaattaaaaataacaaccatatttctgacttattatctataaaatattgagtaataatcggttgtaaatactcctatttgaaccacatacagatgttacttttggtattgcttttcttaagattttaagtaaggtttttccattgttgcttgcaccgttttttatcgctttattattccgttattatattccccggctccacaagtttttactgaaatatcatacttcggctttttatttatgggcggtagcattgaccattgtaatggggcagactactcgctctttggttaacagtactgctgatgtaacggtagagatgttgattgcttttgccggtttagtaacttgttgtttacaattttattttggtaaaagaattggtagtgcatataatgaccgtataagtgcaggacaggcattggggcaaaaaaatacagtactagctatttggatggcggttacgtatcttaatcctttatcgtctgtcggtccgggtagttatgtggtgtggcaaaacattatcaactcatggcagctatggaaaaagagaaagaatgagataaaataatgaatataagatattgatatttagttatttgctgtttatattcatcttttcctttgtttttccgattttcctattaattccaataaatgcgtttattttgttaccagtttgttactcgaatagcgttgagtaacaaaaaaaatatctatatttgccatcggtaacaaaataaaaacataagtatggcgaagaagaaacaagaggcaaaattgaaggagcctgtaagaatccggtttaagcaacttgccaatggtaatcagtctatctatttggactattacactggtgatgttattctttggaatgaaaacaagataatgagtgtcagtagcggtcacctcaccataaaattgtcaaacttcttaatagatataataaaaattgcagaatgttttgtttataaaatataaataactaattttgcagctcaaaatcagaacaaagcatagatattaatgaaacatttgtcctacatattagctttatgggtgctgttattatcaacagttccatgctttcttgaagacaaatgtctgtttcaatgtgctaatgaacaaacagaagaaccatgtgctgataatgatggttcctcatgtacagactgcaattgttcaccatttctacattgcaacacatgcacaggttgtccaatacccaaattgtttcattcaccaaccgccgaattaattctattaaataataacctttcgttttacaaagagaaaatgattcctcatttctcttcctcaatttggcagccgcctaagttgatgaatttagcagatttctgtatgtcataattaatatgacctcaccatttatttattaaattcatgatgatgaaaccgctgtttcatcaccagtacgtcgtgcacttattataatacagattaagtgtgtggcactaaattgacaaaacaagaaaaatgaaaattaaattaatagcactggcaataattacattgctggcacaaagcatttgtgcgcaaaacatatttaaagcaatcgttaaagacggagatactaaagagatactggttggcgtgaatgccgttcttaataaaaccgccaatggagcaagctcagatgaaaacggaataatcaccatttcgaacatacctgacggaaagcaacatatcacattcagctacttaggctatgaatcggaaaccaaatcatacacattccctttatcttcttcagctccggtcgaaatcttcttggaacaagatgatgaaatgctggaagaagttaccatttcttcaaccagaggtacacgcactattcaaaacatcccgacccgtgttgaatttatttcaagcgaagaactaggagaaaaagggagcatgaaaccgggcgacattcgtatgttactaaacgaaagcacaggtattatcacccagcaaacttctgccacatccggaaatgcatcaatccgcatacaaggattggatggcagatatacacaaatattaaaagatggattccccgtttttgctggtgcagcgagcggactgggattattgcaaacgccacctcttgacttaaaacaagtggaaatcatcaaaggctcaacttcaactttatatggcggtggagcaatagcaggcttgattaatcttatctcaaaaactcccgaagagaaaagagatttaggtctgcatcttaacgggacatccggaaaaggtttggacgtcagcgctttctatgggcaacgattcaaaaaggtcggtacaaccatttttgcttcctacaacagaaattgggcttacgacccctctaacaccggattcacagccattccgcagtttgacagatatgtcttcaaccccaaattatttctctatttttcagagaacacgcaaatgagtgtagggctaaatgctatgtttgaagaccgtttgggcggggatattgagtatattaaaggaaatggaaatgacacacattcctatttcgagaaaaacaagactcaaagacattccacacaactgacattcgaacacaaattcggcgaaaaagacagaattgatttcaaaaacagtgtaacatacttcaatagaaatatcggtgtacccacttatacttttgaaggtactcaggtatctacctttagtgaattgacttacacacgcacgaatcaaaaaacagaatgggtggctggtctcaacttatggacagacaaatttgatgaaaagaaacttactgattttcagttaagagactacaaccagacaaccatgggagcattcgtacaaaacaattgggaggcaacaaaatggttgaatctggaaaccggattaagagcagactatattccggattatggcgcagcaattctaccacgagtttctgcacatttcaaaattacggataagttttcatctcgacttggaggaggatttggctataaatcacctaccatatttacagaggatagcgaaaggctacaatatcagaatgtattgccaattgataaagacaataacaagctcgaaagaagttatggtttgaatttagactttaattatgtcacatcaatcttcgatggaaatgtaactttcagcataaaccaattattcttctacacttatctcgataatcctttattattgcaatctacaaaagatgggctatatcgacttaacaacatatccggcaatacagatagcaaaggaggagaaacgaatgtaaaaatcggatacaaagatttccacttatacttaggctatacatacaccgatacccgaaccaaagaaaatggggtgaaacaagagaatatattaactccgaaacataggttgaacagtattctaatgtatgaagtagaagataaatggaaaataggattagaggcttattatttcagcccccaaaaactaggagacggacaaaaaggaaaacaatatgtggtgtgcggcttcatgattgaaaaaatatgggagatgttttcattgtatgctaactttgaaaacttcaccgacagacggcaaacccgctttgatactatatataccggaagtatatctaatcctgttttccgggatatttatgctcctttggatggatttgtaatgaatgcgggtgttaaactcagattttaaattataaaataaactcaaaatcaacaataatatgagaattctaggaatagcatttactttagttttattgatgtcactagtcggatgtactttaagccatagaaactgtagacatcatcatcacttaaatcacaggtcttgccatacacatacttgctgttgtcaacggtaaactaagtgatagtaaaacaaaaacattccattaggagaatgtgtcagaatggacacattctcctttttatctacaattattttgtaatcggaaaccatttccgtgtattatttgcaatccttaccaacatcaacataaccggaacttcaaccagcacacctaccaccgtagccaatgcagccccggattgtaaaccgaatagagaaatagccacagcaaccgctaattcaaagaaattacttgctccaatcattccggcaggcgcagcaatatcatggggtaatttccaccatttcgcccaaccgtaggcaacgaagaatatcagaaccgtttgcagcacgagcggaactgcaatcaatacgatatgcagaggattgttcagtatcgtttctccctgaaatgaaaataggatgataagtgtcaataacagcccacccaccgtataattatcaaacttcttaataaatacattattgaagtattctatccctttacggcgtataatcattatgcgggtaatgaccccagcagcaagtggtatcacaacaaacaagccaacagataacattaaagtgtcccacggaatagatacgccgccaacccccagcaagaaagcaacgataggagcaaacgctatcaatatgattaaatcgttcactgcaacttgtaccagcgtataagcggcatcccctttagtgagataactccacacgaataccatagccgtgcaaggtgcagcccccaataataccgctccggctaaatattcttctgctaattcggcaggtataaaagttttaaaaatgacatagaagaacaaataagctatcccgaacatggtaaacggttttataagccaatttgtaacacaggtgacaattattcctctcggacgtttgccgacattcttaacgctttgaaaatccacttttagcatcatcgggtaaatcattaaccatatcaggatagctacgggtatcgacacgttggcgtattcaagcttgcttaatgtttgcgggattaccgggagccattgccccacagcaattccgataacaatgcacaaggcaacccaaatggttaagtatttttcataaaatccaattccttgtttcttttccataacaacaactatttagtttaattgcggttttaattcatttagatagaagtcatagaaacgggcttttatttcatcccgtacccgatgaaattcattgtcgataaattccggacttccggttgcttccgatgggtcgtcaaacccaatatgcaacctgttttttacttcaccagtaaacataggacagctttcgtttgcaccaccgcagaccgtaataacatagtcccatttttttcctacatatagattgacacttttaggggtatgttgggctaaatcaatacctatttcagtcataacctttactgccatcggattaaccttttcagcaggctttgttcctgctgaaaagacttccagtttactgtcaaatgattgtaataagccgtgtgccatttggctacggcaactatttccagtacaaaggattaaaattctcatattctcaattatttttccaagctatcagggcagcgtttccctttgacaattcttctactttcttaatccaagtcaattcattttgtgcctttgcccgcaaaaaagaattttccgtatcggttaatgataaacaagcgtttacaacccaccatttgttattaattcccgcacgctgtaaatccttttgcaaacgttcggcttcaaagacgggggttgcttcgggcaaggtcacaataacaacttccgtttcttgctggtttcttaaacgtggtaataattttcttaccgaagcaggagaatcgccatgcgtgcgttgtacttccttgtggtagctttccgttgcatccagcagtaacaaggtgtgtccggtaggtgcggtatcaatcacaacaatttcattttccgctttgtctacgatttcggcaaaagcccggaacactgcgatttcttgcgtacacggtgaacgcaaatcttcctctatgtattccatatcttcggcagtcattgtttccgcagctttactacgaacttcgtttttataggcttccagtacttccgcttcatcaatgcggcttactgtaatacctgcctgaactgcaaggttgtaattcaggtggtttgccgggtcagtggtggttagatgcacctttgcacccagtttagttaatttcagggctatttccgtggctaacgttgttttacctacgccaccctttcccatagtaaatacaactcttttccctgactgatagaggtcattaaccaattcgtctataccttttgcatcagtaatccgttgataatccgcattgtctgttaaattatcatcgtatagcatccggcggatatttgcaatgttagatagattatacgaccgtaaaggaacagaataagaggggtaatccagcagttccgcaggggtttgtttcagggcggtttgctgtctgtcatatatttgtttcgatacgctatcggcttcatctaattgcagcaaaagtccgttgattactaatagctggttattaattcccagtaattgtaattcatgcgaagaacgggcagcttctttcaaaggtgcgatttcgggacgacttaccaacactaagcgagttgcatttgcatccgagagtgtttcaaccgcttgcttatagatgcctttcctttcttccaaaccggataattgccctaagcatgatgcaccgtgcgtactttcgctaataaacgtactccaagccgatggtagttgtagcattcgcaatgtatgtcccgttggggctgtatcaaagatgatatggtcatattcttttgctttatcagcatccgtgataaaatcggaaaattgattgaaagcagcaatttctaccgtgcaagaacctgaaagttgttcttccatattttggataacactatcgggcagttttcctcggaaaggcgcaataacgctttccctgtattcggcagcagcttgttccgggtcgagattaactacagttaagccgggtacttcctgaatatccgtgccgtgtccgtttaaagtttgattaaagacatcttgcaggtttgaagccggggctgtgctgataagaagtattttcttaccattatctgccaaacctaccgcagtagcacaggcaatagaagttttgcccacaccgccttttccggtgaagaaaaggtattttgtcaattctatatctgataaattgaatgttctcatttttcttaaataattaattggtgaatacttatttaactggcataaaatctaaattgacccccgtccattcactcatttgtttggtggtaggataggtttgtgaaacagctatttctccatctactaaagtaataggcagtgcgtccgcaccatgcttttgcaggaagtcgttcaccgtcttattgcttacgtatacttgtggttcgtcacgtaaattgtggcgggtaacgatgataccttgtttcttcaatgattcgattactaccgcaatacgcatcaattcaggattgatgtttgttccacaaagacccgtagggcagcacattgccgggtcgaaaatttctatctttttcatactgttttttatttaaaatgatacttaatgtttatttatagataaaatactattgcgtaatatattccaactgcgataaagagaatagcaactattttgcgaaaccatttctcaaatatctgtattcggttgtaaaacttccccagtccggcaacactataagctaaaatccatgcaaaaaggattacaggtaatcccgtagcaatagcatagattacaggtaagagatagccgcctgtttctgctgctgatagagggataagcataccgaaataaaatactccactggtaggacaaaaagcaagagcgaataagacccccaacaacatagctccccaaccgcctttagttttctttttcaggctttccccaccgatattaattttgggtagattgagttttattatatcaagcataaatattccaatgatgattaacaccggagcaatcagcatttccccgtatttgcttacagctttttgcaccataaacatacttgcgccctcacgaagaataggaataagaataaagccaagaaccgtataggtcactattctgccgaaagtgtagagcaacccgtttataaaaatccggtgacggttttctatatccttgcttataaatcctattgccgttatgtttgtagccagcgggcacgggctaactgccgttaaaatccccaatataaaggctgtaatagcgggaacagaactgctatctaataatgattgaagaaagtccatcttacaactgttttaacaattcgtcaatcttgcttttaattccctctttaaacttgtccggtgcatttctcgcattggagaaactaaactcggtcatattgtttacattctcttttccgtctttccagccattcacaaacaaagacgaccatgtaacttcgtacttgtctgcaatcgcttcattctctttcttagaaatatctactactttgtagataatcttgccatttgctttttcttgggaataaagactatccaaaagggctactgtattggcttcaatcgccctgcaagtgatacatcgttgcgctccatgaaaatagagaacttcaatgcggttaggctgtatttcttccgctttgttttcctcgttttttttctttgaaccatttccacaggacattaagaccagcatcgcaatcagtagataaaataactttctcatagttcattttttatttggttatcaactcttttacttccgaaagggacaatctttttccggctgatacaacttttccgtcaatcaccaaagccggaagacctaaaatgttgtactccatgattttcaataaatcttcttccttgattagtgttgcatcgcagcctaattctgaaatagcttgtttagtggtttcatacaatgctttacagcttgaacacccggttcctaatactttgatttccatttctaattctactttaaagttaatataataatcgtaattcgtagaactacgaacaatgattttaaaaaaaggtgctgttattcacagcacgatgtacctttacattggcaatcccccaaaaaagtagtaaataactttcgtgcgagttcccaattttcccggttgatacaataccgtacttttggcgtttctatttctccttgaattaagccagcttctttcagttctttcaaatgttgagaaacggttgccttagcgataggcagcacttcgtgtatatcaccgaagaagcaactttcttgatttgctaaaaaagcaagaatagccattcgtgcgggatgtcccattgctttggcaaaacgagcaatctgttcctgctctactgtgtacggtttatctttcacttcaatatctcctttttatttgttgttcgcaaaacaacgaacaatattttaaatagcaaaaagaagtaggaactttttttcaggtaggtgaaaattgagttttagtttatcgctttgtatagatatccaaaacggactaaacctgtttgtgttgacagcaaaatagatgctggcgaaaagaaaaagaatgtttctcttttcgccagctttatttttatgattggcgggcttttgttacctttgcagcgtaagcccaccactaagcgaatttcttcgtttttttgttactattttgttacccactgttagtaataggtgggcttccttattgataatcagattaatacactctatgatatataatttgtggcagaacatcatcaatagttatcagttgtggaagaaaagaaaaaatgagataaaaaattaagtcgcaactatttactttgttatacgtaatgcttggtatggtaaactatatagttgcgttctattaaaaatgaatttgccgtatatatctcttaaagatttcttacgaaaccagtaaaacgtttcaatccttctgccagtgtagtacgtgggcaggcgatattccagcgcatgaatccttttccttcagtcccatacattgttcctgcattgagccataatccggcttcgttaaccaatcgctgttcgagttcctgcgagtgtatgccgagtctgtgacagtccatccaaacgagataggttccctccaataccgtgataggaaactcgggcagatgttcccgacagaactcctgcatatagagaaaattggcctgtaaatatttgatgagttggttcagccactcttccccttcgttgtaagctacttgagtcgcaattacaccaaaaggattgacatcacatacttcgttatcgttaatggcccggtcgattttcgctcgacggttagcatcagcacaaataatgttcgcaatctgtaatccggcaatattgaacgctttactgggagatatacagactacagaatggtgacggaaattttctgagatggaagcaaacggtgtgtaacggtactctggaaaaaccagttcgcaatgaatctcatccgaaacgaccgtaacatcgtgtcgaatacaaatttcaccaatacgtaccagttcttcacgtttccacacccttccggcaggattgtgaggattgcacagcagcatcaccttcactttcggatcagcagtcttacgctctaaatcttcataatcgatggtgaaagtattacttgcaaagaccaacggtgatgataccatttcacacccattgttacggattgaagaaaagaaacaattatagaccggggtctgcaccaataccttatctcccggaacggtcaaagccttgatgactgccgagatggctgggactacgcccgatgtgtaaattatccattcacggtcaatcgtccaaccgtgacgacgtgcgaaccagcctgtaacagcctcgtagtaactgtcgggcacacgggtataaccgaaaatgccgtgttctacccgtcggcgtaaagcatcgacgatagcgggagctgtacggaaatccatgtcagccacccacatcggcaatacattttcgctttctgcgctatcccatttgtaggaatcggttccccgtcttgaaatttgtttgtcaaagttgtatttcatatcttcatcttaatcggtaaaacaggtacgctcgtcccggagacggatttcacaatcggcaggagccttgatgttctcatctatggttatggaaccgaattcgtcagccacaatgcatcccgacatcgggttcttgatatttgtaatagctccgtgaatatcggcttgcaacgtgctgtactcaaaggtacggtcgcagtcaggtccgaaggtacagttttcaagaataaggtcgtgtgcatagcaaagcggttgctcaccggtaatgtggcagttgaccaaacgtagattcttcgaatgccagccgaggtattcgccgttgagttcggaatcgtagatggtcacattttccacttcccagaaggcatccttcgttgtaatctttgcatgatgaatctctacatttttcacgtactggaacacatacttgctgttgctttccagtccgtccacataaatgttgttgctgaacatgaaaggataagttccgccgtgcagcttgagattcttgatgcggataccattacaacgccagaatacttcgtcggcatcgttcatcgttacgttctcgatatctatttcgtccatttcacggaacatcttcggtgcgtcgataatcgtgtcggtcatcttcaggtgatcggaataccacaatgccgaacgccctccgacatcgaaatagcaacggtcgattttgaaaccgtgtacatgccagaagggatagttaccctcaaagcggcaatctacagtttcgatattgctacattctttgatggccgattcaccggtacgaataatcacattttctagacgaaggtcgtgggactcgaacaagggacgctcgcccccgaattcagcatttttaatcagtttcatttgatatattgttttagttgtcagtcattattaattttaaaagtcatgttcacattgctgcgtccgcgaactgaagccaatcaggatataggcaattcctttttcttgaagccttctattttaagtattctttgaaaaattcctccagcttatcgaatggaataatgtctgtccggtcatataaatccgtatgtacggcatcgggaataatcatcagttctttattatcgcctttcagcttcttgaaagtatcctcactaaaatagcgggagtgagctttttctccatgaatgagcaacacggcactgcggatttcatcggcatacgcaaggataggtgcgttgagaaatgcaagattggaggttttgttccagcccaaaccggagttgatggaacgaggatgataacctcgttcggtcttgtaataatcataataatccttcatgaactgcggcgcatcaccggtaggttccgggttcgtcacggtgcggggataagtgtcggtacggtagtcttccgtgcgctgggcgttaaactcctgacgcattttgtaacgtgcatctgcattgtcagcggcatcgaagtaaccgtttgctgtacagcggctaatgtcgtacattgtggaagctaccgttgccttgatacgtgtgtcgttggcagccgcattgatagcaaaaccaccccaaccacaaatgccaatgatgccgattcgttcggcatccacatccggacgtgtcgcgaggtaatccaccgccgccgagaagtcttcggtgttgatgtctggcgaagctacgctgcgaggctgtccaccgctttcaccagtaaatgaaggatcaaaagcaatcgtcaggaatcctcgttcggccaatgtctgggcatacagccccgacgactgttcctttacagctccaaacggaccgctgacagcaatagcaggcagcttacctccgaaaatcgttttcggtgcatacaggtcggcagcgagcgtgataccgtaacgatttatgaaagtcactttgctatgattcaccttgtcgcttttcgggtacgtcttgtcccattcctgtgtcagatttaactgttccatatttttgtgagtgttttgtgccgggctttccgtcaggctgaagaggcagaggaaagcagccattaaaatagttgtacgtttcataaccgatgtaatttaaatttttattgtttcttgttttcttttcatagtgcaaaattacagcggattacaggaaaagccagtagatggattactgattgtataacctcaattacagacattattttacatgcatctcatccaacgttcccgcttcaagcagatcaggaaaatcagcctctttttcttgccgcattggtgatgatgatgatggagaaaccgatatcgaacagtagcaagagtcttgtgcaaaatctgccgtcgataaagatgtattgcagattatgatacggccgactccggcagtaggcatggcactcgtcgtttcaaccggaagaagggaatacaacgagaactccggaaagttggtcagtgcaatgcccggtagaaccaatccgcacaacccgttcagtatggtgtaccgttcggatggatctgacaaggatggcagtatggttggttagtgattccgattccataggctatcacttttcgttcctgtcgatatctcggatatgccttgccggtacacctcctacaaccgtgttggccgctacgtctttcgtcaccacagatccggcggcgataatggcgttgtcacccacggtcacaccccgcaggatggtggagttggagcctacccatacatttttgcctaaccggataggcgccggatacattgccccgcggtcttcgggagccgtaccgtgatcgagcgtggcaaagaccacattatgcccgataagacagccgtcacccaacgtcacaccgccatgatcctggaagtggcaaccggcattgataaagacacgacgcccgatggtaatattcttgccgaagtctgtgtagaacggaggaaacatcttgaatgtttcgtccacaggtttaccggtcaggcgcgacatgaacgcacgcaattcttcttgtgaatggtacgagttgtttatctcacaggtaacgcgccgggcttcatcgctcatttcatccatcagccgatagatttccggtgtattgagtgcaccgccggcttcaatatgattcaaaaaatcatctaatgtcataatattcttttttcctatacttgtttactcgttttgtatgcctcttgtgatttcgggtttcctttgatttcttccatgtgccatacaccacagcgaaacagtgtaccctttaccatcggtttttccaaacatccattcgcttgttgcgcttgaaataggtgacagaccgccccgttatctgtacgtttttcgtaaagcacatacttattaccatttttcttgggaaccggatcggactgtgttatggcaggtattcctataacaaataaacttgcaatcatgatgactggtatacgtttcattatcacttgattttattaagttttgaattccagaatcttgatgcaaagataagtacatgactgaaaatacagtgtagataaattacagatgttataaccctaattacatgatttccggaaagaatagcataaatctgtagccaaggttgatacaatgtctcaatctgttattctagaaaatgataagtatagaatttgaaatcttaaattgatgttaaacagaaggggatgtgagaattatagccgtgcaataccccggaattgagcgagtggctacaatataggcatcagttatgttatttttaccaatagtaaaccggagcgtatttgtaacagatgagaaaccgaatactgcaagaaattatcatgttgcctctttggttgaaatagtgttatgaaatagagattttaatccatcgaaaatggcaggaagagcaatggtgccatgcacctcgtcgggaaattttttataaacgacatgcaaatgcttgtttttcatttcagggatgatcttattttttaagctgtcggccaatgaaaactggataagtttgattgcaggacgttggcgggtggcgaaagcaacatacaaatgtttgccggagaagtctttttgataaacattctttgctgcttgttgtagaaagactcctcggtcccaccataaacttgggtctattgctatatacgagtcaaaagactcgggatgatttgacagtgtctgtagggtaaataaacctgcgtatgaatgtccgacaagaaagtttgtaccgttggcaggaactttattttccacttccagacgtagttcctctatcagaaagcgatggaactgttcagctccaccacctgccggcttatcatagggacaaatggtaccatcccggcgggcggctgagcaagtaggagtgaaatctctggtccggtctgtgtttaaaacagccacaacgatgcaaggaggcaagtttgaggttttagaagaagagaagaaacgcgtaaaaccaaccacggaatgaaagaaggaatctccatccaatagataaagaaccggataagcctttcctttttcaccagctttggtctcaggtacataaatccaatattttctttcttcattcagtatttcagaaaacaatgtatgacgcgttccgatataaatggaatcttgtttttgtgcggagaggggaaatatccatcctatttgtataaacagtattatataaagtatcttcatttgttcgttttttggggttgcaaagttcgatgaaaatatggatatggacaatccctatttttaggtatttcagaatatctccaatggaatttcctctatgtcttatgattttgtggaggtggcaccggatgcatcggaaggaattgattgaaccggatttttaagtaacttcttaggggaattcattaaaatatcctatcacttctaacatttcccgattaattttgtatttttacagacatacaaagattaactgtaacaagatatgattatttctgtcgtcttcgtatctatgatggtggttttcgtaacagtttatcattttgttacaaagccgaaaaagcagcaagaaaagatttattcggcgatgaccaccgatgaacttatcaggttcgtgcagtccatgcactgtgaactagtgaagagaattgatgctgatgccattatcatcggttttcaaggaggttattttcatttgttaagagaaaaaacaggtcagaatattcagttatattataaagatttttacgcatgtagctatgaacagtctaaaaaaatagtttttgacattaacaacattaactgccgatacacagcttggacttgctatttgcgtaaaagtcatgaggatggagaaagtgagacaccttttacggcttgtctgtctgcctgtctgttcttgtcgggcagtgaaactcagttaaaacaacatttgcgggtattgcttgagtcatcttttatgatagcccgtagttttaaagagttggcagaacaatctgcttcaatacaagacatgttggtgaaaaaagaattcgaaaatcgcttggctttgttgagacgaaaattggagattggacatggtaagctgttggaacctgtcgatgtttcccggcaagatatggatcagatagaggatattctttctctttttggtacagtgaaacaggaagatataaaggaaatgacactggtttgcaatgggcggatagagaggcgtaccgaattattgtctattctttcttttagattgaaagatgctgtgatggatgaaaaaggacaggcgggaaaagatgctctgatctgtatcatacttgctgaagggcagttggtgattgcgttggaaaaagctgaaggcagtaatgaacggtctctttattataagttgtcggctatgcggacggacagggtagatgcttttttcgatgaaacccaaaaaggcagagtattcagtagtatgattgaggtaagattgacaacggatcatgatgattattgggagttgaaatatatgttggacgatgctaaagaaaaagcggcaaacaaacagtttgacgaactgacggaggaacaacaggcgttgctggcttataccgagcctaccttgcagactactatttattgggggaagaaatttttcaggcagcaatgttatcttcaggcgttggggtgttatctttctatttttcggtattatcaagtccactggacagaattgccggagcgtggcaaggaagaatattatgtgatttgttatcatatcggttttgtttatctcacattagggcattttgaaaaggcttattattatttgactaatgctaaaagaaattcatccattcatgcgattcgtgattttaccaactgtctcgtcgaaatgaaggatacaggagctcttgagtatatttattctatggtgagtttggttggcagtcagataaagatgtatggtgatgaaaagaataccttgtttccactttatcattttcttcggcgcagggcagcacaagtattagtaaacttgaaatattattcgcaagctagggaactgctctatcaaatgctgggagaggaggagaaccgtgagtttgcggaacgggaattgcagtatcttgagagtatgggtgcaggtgatgatgcgaagcggaacgagtgagaagaatgtgaggaggttgaatgaaagtttcatggaatttcataatgggatgttgctaggagtaaagcagaaatgtggaaaatgttctgtaacatggactgctcttcattgaactctgtgaagttgcattttgtttgtattgatgataaagtgtaatccctataccgtccttctgagcttttgatttgatggtatcttgccaagtatccttggatgagtaaaggtcgttgatgtttatctttctcatctctgaaagaaaaggtataggagtagagctggccgatgcagcatattatgctaattgattgtcattagtttacatcaaaaaatagaagcctctaaaatttacttgtttttcgcaacaaattgatgatttaacgatttttttcatcctctttctccaaacagagagaaaaaaggcaaaaccgtcttttcggctcccgactttttgttggatcttcgatcagagagtgagtacaatggtcggccagtcagccagttgtttccagtttctccttcgggacatccttgggtttccaggctacgatgaagctaacagttgtggatttgatctaatagctttttgcaaaccaatcagtgagtatcttttgcattcgcatcgagagcttggttacgggaaggtctgtcttttcggtaaagagcttaaagctgcggtattgcctataaacaccgctctgcagtgccaacacctcgtatttgattaccttgaaggactctaggcagttgcccctatgaagagagttttatacttgaattttgtttaacccgatactcttgtatgccgttgatgtgattagtgtttcctctatagctctgccgtataaaataagcattccctatagagttaggtaaagtcgctctataattgaagagagcgactttacttacgatttaatactaaccttcctgatatatccagtaatcattatcctttctattatctttgaaatattgaatacggtcaacgatgtcaatgccttctttgttttgtggaatgataaatctggcacgctctttattgtccttcaaagagtatgatacaaaagcattgttttcacatctcaacagcccttttctgtaagagagcgcacggatatcatatcgttctacagaatttgctactgcttgtccttcaatgagtgcttgaagcatacattggtaggcattagatgattcacgcttttcagagtgcaatgccacaagagcgtatggttgttcatcatacatagtatatttgccataacgctcggggcggaagcatggatacgcgatataataatatcgccaatcgtattgacttttagttttgcattctgttagatacgcatcaattttttcttgtaagtaaatgtcgtctatttctatatcaatctcaagcagagaacgtaatgatttttttgtcttattaaaatctggatttttgcctgtcggatgaaataatgcataccaagccttattgccaatttcatcctgattcccagaaccaagttgaatgcaccaattatttatcctttggctataatcatacgttgctaacattgcacagtcaataatatcgcgagagcatctatcaaagacatggatgaatcgctgataaagatgagtattctcatacccaacaagatctgtacgaccttgaagcagatagtgatcctccaactgaaaaagaccagcagaatgctcgggatgttctttggtaaactggagcttttgacgctcctcttccatctgaattacattgaaattctgtctcacgtcattgtcaatcattatactatctgcaatttctccagaaagaataatattttctacctgacgaagatttgcgggcatacggtttcctgcatcaccattaggggtatcgacaacttcgtttctggaatttttgagcagattcactaccacacgcaagcgtcgacggaaatccatttcttttatcttatcatagttcattaaatagataagaaaggagtagagcattattaaccaataggtagtatttttacgcaacgcggctccggtcaatacccctttgaaaatattgagatctgtaatttgttgagatacgacaactttttcgtgttcatgataatcttttgacaggtaagagttgaaaaaaatatcaatagggttaagtattaatgaattagaacgtcgcgctttgttttgaatattgaccatgcaatcaaaggattgttcaaaaaacactacattttttggttgattcttataaagcctttccagtaaactgaaatcatcttctaaatcaaattctgatgaagagcgatctgacttatagacaagaataagggaaatcatacggaaaaagtttagaaaaccgctatcgacgagattatactcatccctataaatccaaagtaaatcggtccattcgcggtctatcttaaggccaatgcgtttagcagtagcttcatcgtcattttcagaacgcataacctttaagagttctgccttaaaatgctcaaagtcagtgagtggttttccacgggagttcatcttgatgtaaatgtcatcggttaacttcatctcctcaatatcgcggaaatagaaattaattttatccaatttgttccataagtcattaatatcggcaaaacgcttttggatttcatcaagcattgtgagcattcctctaaccgtaggatcgttgctccattccattggaaaccatccctcatttttaatttcatcactaagatgtgttttccatgtaggttcgtagttaacaagctttataagaaaatctctcgcgctataacgtgtgttgtatgaaaacctcgcaagtcgcttatcgttgatgccctcttttttatctgcataccaatgaagtagccaaagagtagttagtcgttgctgtccatcaagaggaatcagctgaccattctgaatattaccataaatgaaatcgagggttaaaccattgtttattaatccagcatgtattgctgatagaaaacgttcacgagtctttactgcatgtgcatcagatcggccttgtgcataagcacgttgaatccgtggtatagtgattccacttattccgtaaggattgttttcagaaatcagattcttcagtgtcgtagtttccatttgtcaagttgggtatagtggtatcgttattatcctgtttgtaataaggtgaaattttctcattaagggcctcggcataatctcttcggtctgtttctccccaaaagaaaagcgatggaccctcttgagtatagtacttgaagaatacgtgttttgtacaaattggaatgtatcttccttctttatcataattaatgacacggtgtcttttaacatcaaaaacggagttgctaagagccgcgttttgagatacatctagtagtgccatatttgctaatccatgcgagtagctattctccttaacgacatcttccttagacgtgaatatgataattacttccttctgaatctcattaaagcgttcacgcacattccctggatccttatcgctatgaagttgttcaatcaatatctccattttctctataagttcattatttacctcaaaaatagaaccttcagaagatttcaaaagtgcaatatgactttctagccatgtaagaatatctttattctttttaaggctttcggcattttgagcgtggatatgctccaaactccatatagaatctttatgtttgtcaaatgggaaccttcgtttaccatcgtccatcagacgttctgtttccacattaaacaaagtcaataccttttgtagtttgtctttccttgtatcgtatgataagctaagtaactcttctttatctttaatgcttattgattctgaaatcattttgtcgagctcgctaagaaatatatccttagcaagaggagtgttgccatcattttgccatacggtataaattttccttagtggaactcctatagtaatcagataaccaattttatggtaaaagtcatggttcgtataccattcgcgtagtgtaagaaacacatgatagatgcgactccatatctcaagaagcggattttctgtggtggtttccgatagagactttatttgtcgatcaaagtaaaagaatgtacgatacttttcacgatcattccctgatttgtctaccatcagatcaaggataagatctatacgagttggcatttgatctccatcaatattggacaaaaagccccaaaatgatggattttgtagttcttgctcaatcatgtcccactggagtgagacttcctcctgtcgtcctgacatcttgtctcgcacactgtctttaagaaacaaggctttgacaagttccgagcttgtcagtggaatttttccaatgtttagacgctcaaatagctcaataccattctcagcagaatccacttcgtaccaaatgacgtttactgatgatatgaaatattcattgagtttggtcaggtaagctgccatttctcgacgctcaccctgtgtcttttctgtaaaatattgctctatatattcgtatgcagatgcgataaaataataatctatattcagctctctaagcgaaagatcaatattaccaagaaagtttgctgattctttacgagtttcatactctaacttaaaactaggttcatatagatctcccagttttgcttccatatacttgcagatgaggtatatggttgtaagacgttgctgcccgtcaatgagctcgaacctctcattgcttttctttacaacaattggttgtaagcaatatggctttcccgcactttcataaatgtcatcgagaaggagttttatttcctccgaggtccatctataaccccgttgataatcggggaggtagaaaaggcccttgatcttccctacattttttgtatcaagaataatgtttgacatattgtagtatcttaatataattttttatacaatgtaatatcgtatgctgactgattttcgatagtttgtatttaaaaggtggaaactttacaaaattacttgttttttcgctaaggaccgacgttttaatgttttttatcgtttctcttcgaacagagggagaaagggtgaaaactgccttctagggcttcgatagatcttgttcacaaagatagggtatgtcggagttcgttttgcccaaaagggtagtaaaatcgaggatagattcacaggtattttctggttcccatgcgagtgttatgtgtcctattcggagttgtattttgttcgatctttacactcggttactctacgttttgcagccaaaagaaaaatgattgaagttatttcatcatagtgcagccatctcttctcccttattttgactttactttattgaacgtatataggaatacggggataaagtaaagttggttttcatttgaatagtaaactaatcttgaatatatgttgtaaggtaatttttgtagaatagacatttaattcgtttggaaaaatgtcgtgtaatggggatgattcgtttgaaaaagtgtagagcctttatactgctgtgtcttctagtcttgcgattttgtctgcaatctatcattaaatagataaaaagtaatatttttacatattatatgataagttgattatgacaaagaatacaatggggattaagttgtctcgaaaattggagcagaagatgtcggttgtgggagagcagataaaactggctcgatagcggaggaatttgagtgtggctcaggtggcggaacgggcacttgttccccgttgactgtgttccgaatagagaaaggcgcaccgatggtagcaatcggaatatacttgcgagtgctgtatgttctgcagcttgatgatgatattctgtggctggtcaaagaagataaattgggaaaagttttgcagaatttgagtttgaagacaagggaacgtgcttcgaagaaagagtaagcgatgaagacgctatatgtatatgccgattttgattggatcgaagaaacagaactcgttggtgagttaggctatgaatctcttcgtagctcggattgctattgttttactctcaatgatggatgttttgaaaaaaacacggagatttgtttctgagcgatgatctgaataattatccgggacagcaatatacgcaaccggagaaagatatatttggatgtttctcggatgctttgccgggtcattgggtggcgaacgttgttgctgcgacgtgagcagattgtagcgatggaggagaagcgaccggtacgaagactgtttcctttcgactatttgataggtatcgatgacttttcccgaatgggggctttctattgtagaaatgattttccgttcggtacgaagctcggctaaatcaaggaatgcggtttttcttccataagagagcctttgggaactatttcgtaggaataggctttctcaaaggcttggtgtccggcatctgtcataagtcctcggtcttcaagattgatacaacgttctttgtttaactcagtccaatgacttcctttgcgatgaggtgaaagccgctgtgcaaggcatccgtctggcaatttctttagagttgaatcaatccacccgaagcacaatgcttcttcaacaacttcaatgtatggaatacattcgtatgtgggctgtttagagcgtgaagttacaacccaacacgatttcacccgattatggttgaccttcagccattctctcaactcgatgcggtctgtgaagtctagtagattgataatttccatatttgcctccaactgatatgttattaatccaactgttttctataaactgagtccaatgtatttccttctttatctttccataccaaccagccgttgttgctgctaccaatacagaaatctgcggcagtactgggacttgaaaaagttttatctgatgtcaataccaatattccgttctcagtagaagtgtaatcttgaagcatcttttctcgtttttctttccagttgaaagacggaaccattgttttggcaacagtacttccttttaggactgtgaatccatcggaactgtagaaaccttttgcattgcatcctctacctttggtgtagaatagatgttcttctttgggttgtgatacttcaaaaatattgcaaccgataaatgatgccaaaaacttcacatcttcgaaaaattcattcattgagtcctgttgatgctccggtaggttaggggctttaggaatttgtttattatcgcttaaaacaaaagcgtttgctttcttggcttcggctatagctttatgttctaggtattgcacatcaactttagtcatatcggcgtctttcgatacaaatatgagtgctttttgccaaaacgattttttgctatcgtggtcttttacacgttctttaaagttctccgtttcacctatatacgcctgcggcttggttgattcatcttcccccagcaatatatagaatgcaggtttttgtaacttctcttgtgtattcaaataagagagattagaacgtggtacgacaaacatttggcaaattttgttgctaatgaatgcgtattgagttccttttgggtctccatcaatgagatatgttgttactgtctttcccataaatatgtctaaattcaattactttgaggtataactcatttaagaactgacttttcttaatgcaaatatacactattatcgaatataattccctatatttgtctaataaaatcatatcaagtaatgaaactgaatagaataaagactgttttatccgaaaaaggtatttctcaaacgtggttagctaaacagctagataagagtttcagtatggtcaatgcctatgcctgtaatcggattcagcctaatttggaaaccttgcaacggattgcggagatattacaagttgatttgaaggatttgataaccgataaaaaagaaaggttgcaataaattatttaatacggttaggaggttctggttccttttgtaacctgttgcagatgtgcctatgaacttccgataatttacaatatcaagaacatgactcctgaagaaaaagcaagaataaagatagaccagtggtttgccgatgctggttggaaagtagtcaacagggaggattatgaacctacttgtacggctgtagccataagagaaggtttattgaaaggaaatcttgaggcagattatttccttttcattaatggaaaagcagtaggggtacttgaagctaagcgtgaagaaacggatgcttttgcttcagaggtatgcgagcaagcagccttatatgcaagaagtgttccgaatatctatcaggcatatcaaaagccattgccttttatcttcacttcgaatggtaaggaactatattgctgtgattttcgtgaacaagattcttgtttcaggcagatcatgaatatccctacaccacatgaattggtaaagaggctgggaattgaagatgcatttgccggactccctacattgaaaaagaaagggctgcgtgattgccaatatgaggcagtgacagaacttgaaaagagtttccgtgccgggcaaaatcgggcgttgatggttcttgccaccggtgtgggtaaaacatatactgcttgtcttgctgcctaccggatgctttcttatacaccaatgcgtagagtgttgtttcttgtagaccgaaataatcttggaaaacaagcagaaggagaatttggaactttccgtctgacagagaacggggaggctttcaatactatctttacggtcaatcgccttcgctcgtcttctattccttctgatagcaatgtcgttatttctacaatacaacgtctattctcattcttgaaaggagaaactattgaggataatgatgatgacgagaatgaacctatagaggaagtaaccttgcctcctaatcccaacttaccgcacgactactttgatatgattatcatagacgagtgccatcgctccatttatgggaactggcgcaaggtgctggagtatttcgatacggcaagattggttggtctgaccgcaactcctatccctgaaacaatggcattcttcaataataactgcattgttaactacacattggaaaagagtattgttgatggcgtgaatgtggattgtcgggtatatagaataaaaacgcaagtcacagaaacgggtggggctatattagagggtgagaaatttaaagaagaaacaagatatacaggtgaggttaagattgtaagtagtaaggaaaccaaaatctatacaaataaagaacttaatcggagtattatcaatccggcacagataaagttagtcctttcgacctatcgggatgtggtttatacggaattgtttaatgacccgcaacgtgaaccaaatatggactttttgcccaaaacattgatttttgctctcaatgaagctcatgctacaaatatcgtacaaatagctaaagaggtgtttggacggactgatgaccgctttgttcagaaaattacctattcggcaggcgacagtaacgaactgatacgccaattccgtaacgacaaggatttccgtattgctgtcacctgtacgttggttgccaccggaacagatgtaaagccgctggaagtggtgatgttcatgcgtgatgtggagtcattgcctttgtatattcagatgaaagggcgtggagtacgtactattggtgatgagcaacttcgcaatgttaccccgaacgcattcagcaaggattgtttttatttggttgatgcggtaggcgtgacggaacatgcgcaaacagtggcacctatagatgatgctcctacaacaaagacgattactctaaaggagctattagaacgtattagtcatggctatattcctgacgagtatctcaaacggcttgctgcaacgcttgcccgaatatacaacaaggcggatgatccgcaacggaaagagtttgtccgtttgtctcatgatgacatgaaggaactttctgccagaatatacgatgcactggagaaaggcattcttccaccgtttgtaagcactgatgagcctaacaatgaacgtaaggggctagtcgctccgcttgccaatcatgcagatgctcggaaataccttcttatacttgcagccggattcgtcaatacattgatgccgggtgaagatacgcttatctccaaagggttttccattgaggaagcaaaaaatacgacagaggcttttgaagatttttgtaaaaagtactatgacgaaatagaggcactgcgcatcatttacaacaatgagggagagcctataacctattcgatgctaaaggatttggagaacagacttaaaatggcaaacaatcattttacatccaaacaactctggaactcttatgccatagttaaccctaaagtggtaaggcgttccattaccaaagaagaaagcgatgcattgaccaatatcatacaacttgtgcgctttgctttccaccaaatcgaacgattggatagcgtagttactacctctaaacagtttttcaatctttggttagggcaaaaccagcgtgaaataactgacaaacagcgagaggttatcagtcgtattgtggattacatcgcttctaacggagcttgtactatcagagatattcgtgaagatgatgctacccatgcagcccaaatgattagagcgtttggcaatatgcagaaggcagacgaggcacttcattcactttacacatttgtagttttaagaaaagcagcataaagaaatggcaacaaataatacaacagagcaatcgctcaccaaaaaagtatggaatctggcaaccactcttgccggacaaggaattggatttactgattatattacccaactgacctatcttttattcttgaagatggatgccgaaaatgtagaaatgtttggagaagagtcggctattccaactggttatcagtgggcagatttgatagtacttgatggcttggatttggtaaaacaatatgaagagacccttaaattgcttagtgagcaggataatctgataggtacgatttatacgaaggctcaaaacaagatagacaagcctgtttatctgaaaaaggtcatcaccatgattgatgaggagcaatggctcattatggacggtgatgtgaaaggagctatctacgaaagcattcttgaaaagaacggacaagacaagaaaagcggggcaggacagtattttactcctcgtccacttattcaggcaatagtagattgtatcaatccgcaaatgggggaaacggtttgtgacccggcttgtggaacgggtggattcttgcttacagcttacgattatatgaaaggtcagtcagcaagtaaagaaaaacgtgatttcttgcgtgacaaagctttgcatggtgtggataatacgcctttagtggtgacgcttgcttccatgaatctttatttgcatggtattggtacagaccgtagtccgattgtttgtgaggattctttggaaaaagaaccgtcaactcttgtagatgtgattcttgccaatcctccttttggaactcgtccggctggatcggtggatattaaccgcccggatttttatgtagagaccaagaataaccagttaaatttcctccagcacatgatgcttatgctcaaaacgggaggacgtgcagcagttgtacttcctgataatgttctctttgaggctggagcaggtgagactattcgtaaacgcttattgcaggattttaatttgcatactatcttgcgtttacctacaggtattttctatgcccaaggcgtaaaagccaacgtgttgtttttcagcaaaggacaaccgaccaaggaaatatggttttacgactaccgtacagatataaagcatacgcttgccaccaataaactggaacggcatcatttggatgattttgtttcttgctataataatcgagtagagacatacgatgcagaaaataatccgcaaggtcgttggcgtaaataccctgtagatgaaattcttaccagagacaaaacaagtcttgacattacttggataaagcaaggtggtgaggtggacaaccgttcattggcagagctgatggctgatataaaggataaaagccaaacgataagtgctgctgtggttgaacttgaaaagctacttgcgaatattgaagaaaattgagttatgggaaaagaggttttcacaaatgataaagatataaacgacctgttcttgaaggttgttaaccttgttacgcaggcaagggaacgtgtggcaacagccgtcaatatagctgaggtttatactaagttccatatcggacaatatatagtagaatatgagcaaaagggggaaacaagagccgaatatggaaaggcggtgctgaaagaactctccaaacgtctgactgataggttgggagatggatggtcatattcaacgcttaagaatatacggcagttttatattgttttttctaaagggctaaccagtggttgtccaaagccgagtcaaaaggctaaccagtggttagccgattatccgaagtcagaggaatgtatctctgagccgacattcgctctctcatggtctcattatcttatactgatgagggtggaaaatccggatgcccgcagtttctatgaaatagaatgtactcaacaacaatggtctaaaagacaactcagccgtcaagtaggaagctgtctttatgagagattggctttgagccgtaacaaagatgaagtaatgcggttggctaaggaaggacaatctattgggaaaccatcagacattatcaagaatcccatcacattagagtttcttggtctaaaacccgatgcagtttattcagagtctaaattagagaatgccattatcaacaagatgcagcaattcctattagaacttggcaaaggatttctatttgaagcaaggcagaaaaggttcacatttgatgagcagcatttctttgttgacttggtgttttacaatcgtttgctacaatgctatgtgcttatagatttgaagatagacaaactaactcaccaagaccttgggcagatgcagatgtatgtcaactattacgaccgctatgtcaaacaagactttgaaaagccgacaattggtattctactgtgtaaggagaagaacgatgcactagtggaacttaccttgcctaaagatgttaacatctatgcttctgcttatcaactctatctccccaacaaggctttattgcaagctaaggtgaaggaatggattgaagagtttgaagaaaatgaggaattaaagaaactggaagaacatgaatagtaattgtgcagccaaaactgcacaattacaaacagaaatataacgatggatacaaaagcgttacgtcaaaagatactcgaccttgcgatacatggaaaacttgtaccccaagatcccaacgatgaaccagcatcagttctgctcgaacgaatcaaggctgaaaaagaacgactgataaaagaaggcaaaattaaacggagtaagaagtctgcaaagtcttccgatacgccccattatgagaatgtgccgtttgagctgccgaattcgtgggtatggtgtagattggaagatatagcttatgttgcatctggaagtacaccagataaaacatgctttgtagagaatggtgttccttacattaagatgtacaatctcaggaatcaaaaaatagattttgcctatcatccacaatatattacagaagaagtgcataatggaaagctccagcgttcgcgcacagaagtaggagaccttattatgaatattgttggaccacctcttggtaaacttgcaattattcctacaacattgccacaagcaaattttaatcaggccgctgtactaatacgcccttacaaatttaaagaggtgttggtatcatatctaaaagtctacttagaggaaatgtcagaaataaattctattgccacacgaggttctgccggacaggttaatatatcactgacacaatctcaaaatatgcgaataccaataccgcctttaaatgaagttagaaggataattgaagaggtgtctaagtatgatattttgattgattcgctcaaacaaaatattactgacattcaaaatcttatagcctataccaaatccaaaatccttgatcttgccattcacggtaaactagtaccgcaagatccgaatgacgaaccagccattgaactattgaagcgcataaatcccgacttcacaccttgtgataacgggcattatacacagttgcctgaaggatgggctatttgtaaaatgaaacagattacaagtataacgaatgggaagtctcaaaaaaatgttgaaacacttaacggtatatatccaatttatggtagtggcggtgttataggcagagctaatcagtatctttgcatcgcaggttctacaataattggaagaaaaggtacaattaataatcctatattcgtagaggaacatttttggaacgttgatacagcttttggcttgaaggctaatgatgctatacttgataaatatctgtattatttctgcttatcatttgattttagcaaattagataaaagtacggctatgcccagtttaacaaaaacatctattggtaatgttttaatacccataccgccatataaagagcaagaacgaattgtggctaaaatagatatggtgcttgatacgatgaatgaaatattacgggctgtataaacaatccgtttttgttctgccttcggtggtataggtatctcttattttgagtattcagaaatccaatatcgtttatgagtgtaaccagattgatatgtgacactcataaacattgccacataatcaatctcaatatcactgtgcatttttagaatcttcattactgatgattttaccttgaaaggaaaaacaactagttttgaatctgttgtaaaatcatcaaagattatacaaggaagatttgagcatatccctgtcgcttcattggtataaccaattataaaagacttacctgctgttaagactggtattgagtaggaatcatcataagccgttgaatttataatataagcagtaggttgttcataatctacaacttattcaagcctgcacatagcccatccttcaggcaacttcttatcatgttcgatatattctcttatattgttactgtattcattataaatcaatgtagtatggtaacaaaattcaaaaatcatttggcaaagactaatctcgccaagaacaccgttacatcgtatgtgtggacggtacagtatttcctcaatcattatggagaagtaaacaagaagaacctcttggcatataaggggtacttggtggagaactttaagccacagacggtgaaccttcggctgcaaggtatcaataagtatctggaatttacaaaacaagagaaactgaaagtgaagttcgtaaaggtacaacagaagaactttttggaaaatgtaataagcgatgccgattacaaatttctcaaagcccagctcaaagcagatggttatgatgagtggtatttcatcgtatggtttatggctgctacaggggcacgtgtcagcgaactactccatatcaaagcagaacatatacaaatcgggcatcttgacctatacagcaagggaggaaagatacgccgtttgtatatcccgaagaacttgcgcacggaggctgcgaaatggctcagagaaataggacttacttccggctacatctttctgaatcggtttggacagcgcattactactcgtggaatagcttctcaactcaaacattttgctgaaaaatacgggatgaacaaagaggtggtttaccctcattcattccgtcaccgtttcgccaaaaacttccttgaccgctttaacgaccttgctttacttgccgacctcatggggcatgaaagcatagaaaccactcgtatctatttacgccgcactgccagcgaacagcagaagattgtggataaagtggtgaactggtaaagttacattagtccttagaagcgttcttgtttacgcttctaaggaattttgaataccgtcaaaaatggagaatgtctcttcaatcttggctactatgcgctgttgctcggcaagtggaggtaggggcaatatatattgttttgccttttcaatcgtaatggtatcaacagttgtaccctttgagttatcatacatctgttttagcatatattcgcttctcatgatgtggtaaatatatttcgcatttatttgatagtcattacacaaacaaagtacacttgcatccttgtaatagaacttatcagactcttttacaatgtagcatttgccaatagtaccaacggcagaaatcataatatctgacgctttgggtactggaaatttctcctttaatgagttataatgttcctctgaaatatataattcattatctacaagtccataaatagacagcttggctatttcacgtgctctataaaatggaacaccactatgcttccaatctgacttcaaaattcttttagctgatacgacattaaatattgaccctaaatttgtcgttatccacccgctcggaacgtcaaacgtataatgcccgttatcacaaggtgtgaagtcgggatttatgcgcttcaacagttcaatggctggctcgtcattcggatcttgcggcacgagtttgccgtgaatagcaagattgaggattttactttttgcctgcttgatagttgtttgtaaatcttccttgctattcttgatagtatcaattaaagaaatccacttagccacctctacaacaattctttcttgttcctttaagggtggaataggtatcattaattgcgaaagcttttgagcattgatattagattgattaacagcatccgtttttacattatagcaccaattacgataatagctgctattcattacagtattaaggtagtctgaaaaaatcaatatcggtctaatgcgaataagatagccagcatatatggctggttgttctttcttatagattgccgttttccctacccattcactactgtttgtgcgattgaacagtaaatcgtctttttcaagtgagtacagcttaatatcttcattatttgacgaatacactaaattagaataatcgattgtaccgacattagtaatattccccattcgcaagacagctatttttcccacacttaaagacttctctgaagttccgtatttcaattcgcacacaatatcttctaaattgcaccattcccacccattgggtaacaaatagggataatggggcgtatcggaaggaaaaaaggagaggaaaaatcctctccttaatctaaaccatgtattagacatttaagtttttcatcggcaatccataattgttttggttgaaaatttatatgcagcatattcacattcatactaatcagccttcttcattctaatggtacaagtaacatttgataaatagaataagaaacaaagcacttattcttcatttatccgataaataaccatcggaaacaatgctgtcattgcagcaggtttgatcgtgacaagagaggttccggcaaatacggttgtgggcggtgtgcctgttagtcatatccgtaatatcaaggaataaagaaaggagataaccaatagaaagttataagcaaatatgccctcatgttctcattatgtatataatccattgataatgagtgttaaatgaatgatggtagcatatttttgaagaaacaatttgccctcatgctctcactgtttaattatactgattattatctaatattcttatattcaatgtgatatagctgaattcgtttcaaaatcactcaggtgagaaaagagtctattttgccgttttaggtgaagaaaaatggcataatgcctacaagatcccttttatatacacgaatcttatcatattttgctaggagaaacaacggtaactactgcattttagggagttcttgatagtttatatagaaatcattatatgataatcggtcattcatattgcagttctttactatgggaaattgcttaatcacattagtggttagacttaatcacacttgtgattaactttagtcacgtttgtgattatagttagtcacattagtgagtaagcaattgcgaataatagaaagaacaaataggaaagtacgatgagtagaacttgtcagcatgaaaatgtaatcggatgtttgtaaaatagagtatactgtgatgaaaaagctcaaaatgcgatggctgacaaacttttgaattaagacttcgtatgtgctcatattattggttatcagatagatatgctctttttatttgttctgtagaatgagggcatgagggtaaagatactttttgaaatatgctaccatcattcattcaacactcattatcaatggattatatgcataatgagagcatgagggtataattgcttataactttctattggtattggcgttatgttgagtcgatttattgtgaaatacagaagtgtttttaatgcttgtggtagcaattattaaaaataatcgctaagaaacgtttttcctatttaagaaattattatatttgtaccgactattatactatggcgtagtagaacgttacatattttaagaagcgttattgaaattatcttctatcgtcaaacttcgcaactttgaactgtacctgaagatgataacaacaacgctcacgtctgtgttatatacctgccattactgtggcatctatatacctaatggcgtgggtggctgttgtttatctaggtacaaggcaatgcgaaggcccgacgataagataaacaagatacagccctcacgcttttttttattaaccgccgaacagaggagggggagttaggcaaagtcttttgacaagatagactgatctaacatttacagacgtatgaaaacaacactgcaagcgggaatgcgaatccttatttcccgttatctgtcaagtcgaggttgcggagacacagtatatgtcaccggaccgccaggagtcttctgcccacagacggcaattatagcatctttttgcaaaaaatattctatggtataattggggcgtataatgtctgaacagaatcattgaaaaattataatctaaatttattgtacggaaattatggaaacaaacaatatggaaatgtatgaggctcctaaagtggaggttatcgaagtagaagtggaaaaaggatttgcagtaagtggtggaacagaagactataacccgcagccttggtaattgaaataaataatttaaaaacatacacgtatgaaaaagatattgttcacatctttagctgttcttggattaggaataaccggttgttccaatgaagatttgggcgtggcgaaaagtggtgttgatgaagtatgtgccactatgggagatgctgaatcgcgtactgctatgaatggcaattctgtcgtttggagtataggtgacgagattggcatttttgtaacgaatggaagttcttctacttacactaacattaactattcattatccagtggagccggaaccaagaacgcagggttctcaggggtactggaaggtgagaatcctgtaaagaaagctgctttttatccttatggtagcgatgcttcttatgatggaagtaaaatatcattaacgttgaaggatacctataattataaggaaggagaaaacagcagtgctcttatggcttgccaaataaatgagagcgcacaggatgtcttggcttttaaaaatgcaggtgccctgatgagcataactgtcaataatatcccgaaggactatacttgggcgaaattgacttctatgaccgctcaagaaaaaactactgttccagccattgctggaaatgcacaaatagcattcgctggtggtatccctacattgacaaccacagaaacgtcaaattcctcatccataactataaactttactgccagcagtgacgtcgtgaccagtaaaacattctatttcccgttgcctgtagccgagtatcctgccttggaactttccattggtaatggcgctacaagcaaggttttaaagacaaaagctttagatgctaaacgtaacgaacgttataccacaactataacgttggacgaagtatccggaagtgtgccgacaacagttgaaagtgtatcagcggtagccgatgctttaaaagaaaccaattctgtttctgtggctgatgtggcttcaactgaacccagtcctacggtttcaataccgaaaaaagatacaccggcagaaaatgtcagcatatcctttgaaaatatttctacaacaaatgctgttgccattaaagaagagagcactggtactggtggtacagctgcacctaaaaacgtgttggtatctgtaccgcaattagatactgcgcctaaatttgagatagatctgccttcttctaccgtaactttggctgccaatggcgaaacagctacttatgatgaagtaacggcaactactgctgcaaacacattggttcttggtaaaggagttactgttaatacattgaaggtaaaagccggtaatgtaagagtgaagagtggtgccaaagtaacagccatcagtcgtgaaagcggtaacacttcaactgtcattatttataaagaagagggtgctgaattacccaatctgtccggtaatgatgcatttgaagtagttgatgctgccgtagccgacttgcaaaatgtcgcaaaaaatggtggaacttatactcttgccacagacttgacgggagattttactatttccgcaacgaatgaagttatcatcaatttgaacggtcataaaatcaccaacaaatctggcgatacatttaccgtaaacaaggatagtaaactgaccattaacggaaatggtacagtggataatgtaagtcacgggaaagcttgtatctataataacggtacagtaattcttaatggcggaacctatattagaagtaaggaaaacggtcagaactcagaaagttcaggtggtaacagctattataatattctgaatcatggcgagctgacgattaatccaaatgtggagatatcgcaaaacgggcattattcttcgatgatagccaatgggtattatgattataccaatacgaatccgcgaaatggatatgtaagcggtactaatcatcagaatccttcacttatcataaacggtggtacatttgccggaggtcttaataccattaaaaatgatgatggagcccagcttgtcatcaacgacggtacgttcatcaatatgtctcaggcaaccgtacagaatcatcatgtggctgaaatcaaaggaggtacattcaatacgactggttccgctcagtatgtggtggataatgaaggccataatggtgcagccaatgatttgggacagatgactatcagtggtggaacactgaatggcaagatctatgtggttggtgcaggtgcatcgctggctgttaccggtggtactttttccgatccgtccgcacttttatacttaagcggtaatgctaacgtgaagatacgtttgaatggagacgctacttgtaatggctttaaaacgcaaagtggacaatctgtagaattggacttgaacaaccatgtgcttacacttgctaaaccgaccgttggttcggctggcacagaaacgaacagttgtcaattgttgaaaggttctaccgttactatgaaaaacggaacactggcaagtgataatgataaaattatgattcagaactactgtaatttgacgttggatgctatgacagtgagggggctaaatgccttatatgtattgagtaacaattgtggtaatattttaattaacaatactacgattaatgccggaactggtgcatatgcatttgatgtttgcggcttttcaacctacactgacggagttaaagtaactgttaaaggtactagtattattaatggtaatgtggaattatcaaaaagtaccggaaacaccgaacctatggaattaaatattgagggtggtacttttaacggcaatttggttgttgattcatcgataacagatgcttcctctatcattaacgtgacaggtactccttcttttacaggaaccggttgggatagttatataaaataagagaattatttgctatcatgttattagtcatggcagaaagtgatttgtaataaaagaaggtcgtcctgtctcgaaaggtcgggcggctttctttttttaagattagaagattatgaaacttaatccccatttcaaactccgctccatagccggagaaacaataattgtgaaccaaggtgttcccgatactgatttgacccgtattatttcctttaatttttccgcttgcttactttggaaacgactttcgggaaaggatttcactttacaagaggcagccttggtgttggtggaatcttatcatatttctcaagagcaggccgaaagagatgtggtgatttgggcagatgcactaaagaaatgttcagccttacttgattgatataacaatggatataatactcgataaaccggagcaaatgctatttgccttgctccgatccgcgttgaacagcacaaagccggttagtgaaatcctttttaccgatatatctcctgccctttggcaggcgtgttacagactagcttgcactcagggagtgatggccttggcatgggacggaatacaaaccctgccggcttgtttgcaacccccgaaggctttgaagttaaactgggcgatggcggtagagaactatgaaaaacgctaccggcggtactgccataccatagccgaactttcagctttttataaaacgcatggcattaccacggtccagttgaaaggagtgggtctctccacctattatcctattccttcgcacagggaagggggagatatagacatcttcacttattcggcagaccattcccggaaaagtgatgccgaggccaaccggctggcagaccggttaatggaagaaaaaggaatagaggtggactttgaacactccgaaaagcatagtatgttttactataaaggtattccgatagagaatcataaaaccttcattaattcggaaacataccgtatagcggtgaagatggataagctccttcaaaaactgctacaacccgtatcggcggaattggacggaaaatgctccattttaatcccatcttccacctttaataccgtatttctcgcttttcatgccgcccagcattatgcacgcggcctggcacttcatcatctttgcgactgggcttgcctgctgaatagatacggcctgcatattcctgaggaagtgacggatattcgttttagaaatatgatgctggcaatgacccgcctctgtaatgattatttgggaacttccgttcctgtatatggaggagaagagttggcggaggaaatcttacgggaaatcatccgtccaccctatacgatgtcagttccggcgaagaataaatggggcattctggtttataaaaccaaacgtatgctgcatactcatcgtgcgtgcaacagcgtgttgcgcatttcactgtgcaaatgggttggaaattctattctgttgcatctgcgctctccccataccatcttccagacggaacgaaaataggcggtttatgttgaaaagaatctgccgtttgttgttgcctgatgaaaggaaaatggggataagggtggtttgtgccgtatttctttgcgcattacttgactttgccggactcgctgccctgttgcctgtcttgttttttctgttggatgacgggagggataaagatgccgccctgttattttgtctggtggcaatagtctttattttggtgaaaaacgctttggcagcggggctttcacgttttcaaaaccattttctgatgtctctttaccgtcggctcagcttttctctctttacttcttactatcaacggggattattgtttatacgcagcagggggagtatccggctgggatatgaggtgaactatatctgttatgctttttctttaaaccttctttcccccttgcttcgcatgacaggagaactgctgcttgttttttgggtgacggcagctttgttggtttacgctccgttgacggtactgatgctgtatattgcctttctgcctttcatgctgatttacggatgggggatcaggaaaccgatgcgccgttatggtgagcaggagcagcaggctcgtcgtgagcaatcccggctggtcacggaaacgatgaaagggtatgccgaattggaactgaatgcggcgtttccttttcttcagcaggcattcgcccagagggtaaggaaaatcagtgagagccgtttgaaactggaaacgatacagcatcttcctctttgcctttccgaaatggcggtcatatcggggctgaccctgctcaccgttttcggaacaggggatatcaaagcgctggtaggtgtctttgctgtggcggctttccggctgttacccgctttgcgcggcatcttaggtggttggacacaagtacagaatgcggtctattctctgcggattatagaggaagggttgggggataaggggatggaagcagtttctccatcatgggggcaggaagcgttttcttttcaaaaagagatacggatagaacacctcacctatgcttatcctgaaagtaaagaggttctaaaggacttttgttgtactattcgtaagggggaatatgtaggtatctgtggtgagagtggcgtgggtaaatctaccttgtttaatctgcttttgggatttatcactccggataaaggcgctattcggatagatggcaggccgcttgccgatgtgccgaggcaggaatggcatcgcagggtgggatatgtgcaacaggaagtgtttgtgctggatgggaccttggcggaaaacattgctttgggatgccggtctatagataaggaacgggtagcggagatagtgaggctggtgagattggatgcttgggtggatgaattgccgcaaggaatggatactcctttgggtgaagggggaggaaggctttcgggaggtcagaaacaacgggtaggcatagcccgtgctttgtataagaaagcggaggtgcttctactggatgaggctacttctgcattggataatgagactgaacgggctgtcaatgaaatgcttctcggtctgatgaaggagtgtagggggctgactgttcttacgatagcccatcgggaaagctcgttggcatattgtcatcgtgtaatcagattaaatggaaaagacaatggatcgaatttataaaataggtggccactgcttcgcattgccggacgaaaggttgatggaggcggtggatggtatcagcggtttcaagccttttgtttggcaaccggatctggtttcggcaaaagatgtatatgagggtgcttggttgccggattttactgtttgggagggaaacggttgggattttccggcttttacgagaaagtcctatgggttcggatatgaagatgtaaccggtactttcggtgtgagtggggatagctttttgttggaactggctccgcagggagaaccgtcgctttatctccggacgatgggtggaaccgggagaggtatctgtttatgtggtcattattctccccgtcttttaaggtttgccttatggatggggtatggtctgatgacggtacggaaagatacggttgccttgcatggcagttgtattgtttataaggggaaagcggttctttttttaggtgaaagcggaaccggaaaaagtacccatacccgtttgtggagggaaaatatagcaggaagtaagttgctgaatgatgacagtcccattgtgcgttatgaagaggggggcgtgtgggtatatggcagcccgtggagtgggaagactccttgttataaggcggagcgttatccgttggccggatgtgtacgtttgtcacaagcaccgtataacaagatacggagattgaacactttgcaggcttatgcagctttgcatccgtctgctcctcctgcatttgcatacgaggaggaattatacagtggggtttgtagtctgttggaaaagatggtttcatccattcctgtttatcatctggagtgtttgcccgatgcggaggcggtgaaattagtatgtcgtactttatatggagatgggtatgaagcggatagcgaatgaatgtttctttgcgtgggtggagtcggaaatcaaaagtggcaggagtgtgaagttccgggtgaaaggcaattccatgatgcctttactgagaaatgggaaggatgaagtggtggtggggccgtatgataaggaggagttgaaactttttgatgtcattctgttccggcagacagaccggtatgtattgcatcggattattcaaaaaagagacagtcgttatctgatgcagggggatggcgtctgccgtttttatgaggaatgtgaggacacggatatcatcggggtggtgagaaaggtatgcaggccttccggaaagaagattgaaacggattccatgtgttggcggttggaaagccgtttgtggttggggcttggtggatgcagaggaatggtgctgcgtgtcctgaatagattgggttgttgtctccttttttgacgaaagccggcagcttggaaggaaatattattcataaagcaggtatttctctctcatctttttgtaggcttccagttcattctgccatcctgcacggatttcttcttcactggctcctttcatgatttgttcccttacggtacggttccctatcagcaggtcgaaccattgcgggcgggtaaagaacttgtccgctttcccaagatcttgataagcttgataataggtgatgatgtattttaaagagaatcctttcggggcggtgatatggcggagattattgccatagcagtattggtttttatacatcggattcttgtcaaagccttccaaggcttccggtctgaaagaaaaggaggagatgcggatatccggtgaaccgattacttgaaaaggataaagagtacctctgcccacactgatggctgtaccttcaaacgggcagagtgaaggatataaggcaattgcctggtcgttgggcaggttgggagagggttttaccggaagcgaatagggttgtccgtgtttccagccttccacggggatgacggtcaacgcgcattttttgccgttgggcagccagccttcgccattgatcatttgagccagctcgcctacagtgcaaccgtgtaaaatggggatggcgtgcatacccacaaaacttttctggtttttctgtcgcacagggccgtccacgtaatcacaaggattgggccggtctgtgatgaccagttgtttccggttctcggcacaagcttccattacatactgcatggtgctgatataggtatagaaacgggcgcctacatcctgaatgtcgaacacaatcaggtctatgtcctgtagctgtgtggctgtaggtttcttatttttaccgtaaagggacaggatgggtattcccgtgcgggtatcttttccgttcctgatggtttctccggcatcggcgtcaccccggaagccgtgttcgggagcgaataccttttttatttgtatatgcgctgcaagcagggtgtccaacagatgggtttctcctactttggaggtttggtttacaaccaatgccacacgcttcccttttaatataggtaagagacggtccatctgttcggctccggtgataaccttttgcgcggtcacggcgttgcagataaacaagaggcagtataggaaaatgtattttgttttcatgatatgtggcgattattttgtaatattgcacaaaaataagaatttaattgagaatggacgcacttgctatcattaataaatattatcctgaagataatgaactgaaacatatcctgctggcgcatagccgttcggtggccgataaggcgttatggattgccggaaagcatccggaattgaatctggacaagcagtttctggaagaggcggcgatgttgcacgatattggtatttttatgacggatgctgagggcatttgttgtttcggatcttatccttatatttgtcatggatatttgggggctgatctgatgcggaaagaaggatttccgcgtcatgcattggtctgtgagagacatacgggagcgggtatgtctttgcaaagtattattgaccagcagttgcctgttcctcatcggaatatggttccggtttcgctggaagaacaggttatttgctttgccgacaagtttttctcaaagacgcatctggacagggaaaagagcgtggagaaggcgttaaagagtatttcacgttatggggaagatgggataatccgttttaaccattggtgcgaatgtttcttgtaagccttaaaaataaattaaatatccgctaaatagttcattattggcggataatgcttaattttgcccctcaaaagcgtaaatgatttgtgaatgacgccactaaaacgacatagatttataacattcctactactatttgcatgcctgtcactttctttaagtacaggtgctcaacgcagaaagcggaattctgcatccggtaatgattccctgaaagtagatagtgctttggtagatacgttgtctatcgatacggttgcacctaaaaagaaacagccgttggatgcgcctgttatttatgaagcaaatgactctatcgtattcactgagggcggatatgcccatctgtatggtgacggtaaggtgaactatgagaaaatagagttgacctctgccgtgattacaatgaacatggatagcagtacggtgtatgcccgtggtgttcccgactcggttggcgtggaaaaaggtactcctgtctttaaggatggcgagactccgtatgagtcaaaaatcatgcgttataatttcaagtcgaagaaggggttcattaataatatcgttactcagcagggggaaggatacgttaccagtgaggagtcgaagaaaggtgctaatgatgaactttatttgcgtcacggacgatatactacgtgtgataatcacgaacatcctcacttctatctgaaactttccatggcgaaagtgcgtcctaagaaaaatgtggttttcggtcctgcccagctggtggtggaggatgtgccgttgcctatcgctattcctttcggattttttccgtttaacagcagttattcgtcaggattcattatgcctacatacggtgatgaaatgaatcgtggtttttatttgcgtgatgggggatattatttcgccatcagtgaccgtatggatttgaaagtgttgggtgagatctttacgaaaggttcatggggtctgtccgtgcagtctaattataacaagagatataaatatagcggtaatttcaatgccagttatctggtaacgaaaaccggtgagaagaatatgccggactatatggttacaaaagatttcagaattgcatggagtcacagacaggatgccaaggctaaccctaacagctctttttcggcgaatgtgaactttgcgaccagtagttatgaccagcgtaacctgagtagtttgtacaacccgcagcagtattcaaataacaccaagacgtctagtgtgagttattcgcgcaatttccccgaaataggattgaatctgtccagtacattcaatatctctcagaatacgcgtgactcttctatcagtgtgacgttgccggatttgaatatttcattgaaccgtatttatccgttcaagcgtaagaaagcggtaggtgatgaacgttggtatgagaaaatctcactccaatataccggccagatgacgaactcgattaataccaaggacaatctgattctgaagcagggcttgaataaatggactaatggtatgcagcataagattcctatcagcgctacattcactttgtttaaatatatcaacgttgtgccttctttcaactataccgagcgctggtatatgcgcaaggtggagcagagttatgatccgtcggcacctaataatgtgcggagagatacaatcaacggtttcaaccgtgtgtataactatgatttgagcttgcaggtgaataccaagatgtatggtttctacaaaccgtggaagaaattgtttggcgacaagattgaaatgatccgtcacgtctttactccttcggtgagcatgagttatgcaccggacttcagtacgtctaggtatggatatgtgggaacgtatacttatactgatacggatggtgaagtacgtactcagacttataatccatatgaaggtttgccttactctttctcgcccagtggtaaatccgagaatttcactttctctatagataataacgtggaaatgaaagtgaaatccgatgcggatactaccggagtgaagaaaatcagcttgattgaccagttgggagccagtatttcctataatgcggcggctaaagagaaaccttggggaaatttgagtatgaatctgcgcttgaaactgaccaagagttatacttttaatatgaacgcccagtttgctacgtatgcttatgagtttgataaagacggcaaggtagtggaaggtaaccgtacagaatggtcatacggacgttttggtcgttttcaagggtatagcggttctttctcgtatacattgaataatgattcgtggaaaaagtggtttggtccgaaagatgaaaaggacagtaagggggataaagacaagaagaatgaaaatctggatgagtacagtgatgatggcaatgaaaacacggaggaagaagataactccggtttgagaaagacagagaaggcggctatagatccggatggctatatggctttcaagatgccatggtcattgagtttgagttatagttatagtattcgtgaggacagaagcaagcagattaatatcaagacgatgagatatccttattcggtgactcattcattgaatgtttccggtaatgtgaagttgggtagccgctggaatgtgaattattcttcggggtatgattttaatacgaaagagatgtcaatgacaacggtcaatatcagccgtgacctgcactgtttcaatatgagctgtggcttggtattcggtccctttacttcctataacttcagtattcgtgctaactccagtatgctgaccgatgctttgaaatgggatcagcgaagcaatacgggtagtgcggtgaattggtactaggaagaagttgggaataaaaaaatgagaaatggtttctgataacaacacgcaaccatttctcatttttttattctgttttttatttatgtctaccactcaatcggtgtttgcccgtgcgcttgcaagtattcgttggtacggctgaagtgcttgttgccaaagaaaccgttataggctgacaggggggacggatgtgcggaagccagtaccaggtgcttgttgcggtctatgaaggcaccttttttctgtgcataagatccccataagatgaatacaatattttcacgttgttctgccagtacacggatggcggcatctgtaaattcctcccagccccgtcgttgatgagagcctgcctgatgggcacggaccgtcagtgtggcattgagtaataaaactccttgattcgcccagcgggtcaggttgcctgaagtagggatgggagcacccaaatcgctttgtatttctttgaaaatattttgtagggaaggaggaaaaggtactccgtcattaacagagaagcagagtccgtgcgcctggccgggaccatggtagggatcttggccgataatgacgactttcactttgtcaaacgggcacagattgaaggcgttgaatataaatctgcccggtgggtaaatagtggcagtctggtattcgcttcttacaaactcagtgagtctgataaagtaatctttttcaaattcgggtgccagatgttgtttccagctttcttctatttgtacgttcatggcatttcttttattataaaatgtgcgttaaagataggggtaatttgtaaaaatgacaaataaaaagaggatgactttttataatcatcctcttctttcattgctgatagattataatcaaataagttgcatacccagttgagcgcattcttttctcatatcttcgggccatatactggcttggatttcacctatgtgggctttctgtaaataaagcatacagagtcgtgattgtcctataccaccgccgatacacaaaggaagagtttcatttagcaggcgtttgtggaaatacagttctttacgtttttcctgtccgctgagtgtcagttggcggagcagcgcttctttgtctacacggatacccatagaggaaagttcgacggaacggtccagtactttgtcccaaactaacaggtcgccattcagaccgggaagtccggtttccgggttgattgtggtatagtcgtcatagtcaggtgcgcgcaagtcatgttctttaccgtcactcagtttgcagcctatacctataataaataccgcaccgtatttttgtgagatggcatgttcacgttctttcggactcttgtcgggatacatctggcaaagctcttccgagtggatgaaatgaatgtcatgtggcaggaagggtttgatctgcgggtacatttcacataccatatattctgtgcggcgcatggctgcataaatacgggttactatttgtttcaggaaatcaaccgtgcgttgttctttggtaattacacgctcccagtcccactggtctacatatagcgagtggagattacctaattcctcgtcagcccggatggcgttcatgtctgtatagatgccataacccggctctatattgtaatcggccaaagtcagccttttccattttgccagtgaatggacaacttcggcctgtgcgtctcccaagtctttgatagggaaagataccgcccgttcggttccgctcaagtcatcattgatacccattcccttcaatacaaatagcggggcggtgacacggcgcagacgtaattctgacgacaggttctgttgaaagaactcttttatttgcttaatgcctaactctgtttgttttaaatcaagcaaggctttatagttagctggtttaattaggtaactcattgtaaaatagatctagttgttttaattgcttgcaaatatagaaattatttgtgatattgttatatgtttagccgaaaatataatcaaattgattgttttatacttaaattaatgagcaaaatattattttgatagataaatatccccaattattaggataaagacaatatattttgtacttttgcacgtccaagtttcagacgcacccgtagttcaatggatagaataccggattccggttccgacgatatgagttcgattctcatcgggtgtacaattcagtaacctctttgcaaagaattgcaaggaggttttttcttgttatatcttctccgtatgaaccttttttccttttttgagttattcccttatgtaactttttaaaatatgccttaatatttagtttattctaaaaaacaaagactaataaagaatatagttccttttgtttcttgtatatactaaatatacgtgcatatattcgctgttgattttaaaattattttctttttgaggggttttaaaactaacacttaattaaacttttttatttaaacattaatttatcaaccaaatctgagattcatgaagaaagctctcttttttatcgtatgcctctgttttgcaataaacatgatggcgcaaacaaaaacgataacaggggtagtggtagatgccaccggtgaacctgttatcggagcgagtgtcctggaggtggggacaacaaatggtacaataactgatgtagacggtaactttactatccaagtgcctgtgggggcaaaactggatgtgagttatataggttacaaaacacaacaaattgtagtgggagtgccaaacacctacaaggttattttaaaagaagatgcagaaatgctggatgaggtcgtggtgaccggttatggaatgagtcagaaacgttcgttgatgacgaactctatttcaaagttggatgataaagtattacaaaatgcagctatgagtaatgcggcccaatccttgcagggaactgtcagcggattgcgtgtgacaaatacttcgggtaaaccgggtagttcgcccaatatcgttttgcgtggtggtgcttccataaacaagaatctggaagggccgttggtcgtggtggatggccttgtgcgttctatggatgatatcaatccttcagatattgaatccatacaggtgctgaaagatgcggcttccacagctatttatggtgcccgtgccaataacggcgtaattctggtgacaaccaagaagggggtggaaggcaggacacaaattacttataagttcaaagggggtgtgaactttgcacgtgaagggtataagtatttggatgccggtgactatttgtattatcaacgtttaggttggcagcgtaccaatggcggtacaagtatggagaaccagaaaggttttggggttaactccggagtggatctggcctttatgacagatgcaaacaaacatttgctgaatgaaggatggcggtctatggcggatcctgtggaccctgataaaactttgatttttagaaaccatgccggtgagctgcatgatctgactttccgcaatgccgcgtttacacaagatcattatctgaatttgtcgggaggtaatgacaaaggaacattttcctcatctttagggtattattcggaagacggtcagataatttctaccaattatcagcgtgtgaacgggactatcaacggttcatacaagttgttgcccgttttgacagtgaatgccggcggtagtttttcatggtccaagatgcccgatttatggacttacgacttgaaaagcccttggaacggagaaacgggagagtatgagttgttctatcgtaccatgagtatgtttcccacctggaatccgtggaatgaggatggaagtcctgctgccggatggagtaatcaggatggtaatccttattattggaaagataaactgactcgttctacaacgaaccgtaagacttcgtttaatatcggttttgctttggaaatccttccgcagcaattgttcctgaatggaaacagttctatgtattatacagacagtcagtttgaactgtttgaaaagaaatatcaacagataggacaagctcccaataccaatcgtaatgcttctcaaacaaatacaaaagtttttcaacaacagcatgcattgactctggaatataaaaaaggttttagcggacataatatcaatgccatggcaggtggtgagtattttgattatcagtatcagaacctggaagcgcgtgtttccggtgctcctacagatgatatacctactttaaatgcgggcactaaccgtacttatactacttctgtcaaaaccggatatcgcattctttccggtttcgcccgtgttaactatgattataattatcgttatatggtgtccttggtagcccgttatgacggtatttccaaattgtccgacaatcgttggggattttttccgggtatatctgccggttggaatgtgcatgaggaagctttctttaaagattcaaagtttgcggaagtagtatccttgattaaaccgcgtatcagttatgggttgaacggtaatgtaaacggtatcggtaattttgatgtatatggtaaatatggttcggtaggtgcttataatggtaatctgggttatttgaatacaggggtggtcaatagtaaattgcgttgggaaaagagccatacgtttgaactggggcttgacttgggctttttcaataatcgtattcatatgattatggactattatgaccgcacgacttccgatttgctgactgatgtgaatttgccggaatatacaggatttccctcgttcaaaacgaatctgggtactatcagcaaccgtggtttcgaactggaagccaaggtgaatctgctgacaaggaaggactggtcatgggatgtcaccgctaatacttcgtttgtgaagaatatggtgaagaagctgccttttaacgggaatgtgaacaaccgtcaggggggtgagcaggtatgggatccaaaatccaactcgttggtttgggtaggcggcattcaagaaggaaaaagcttgggtgatatcattgcttataaacaagtgcgtatcttgcgtgactgggatgatgtgagaaatcatgccggtgattttgtggatgaggttgccaacctgtatgggccgaataaggctgccgaatatgcgggtaaaccgggatggaaacccattgagccgggagatgtactgtgggatgacaagaatggggataatgttataaattcatacgaccgtcaggtggtgggtaatatttatccgaaatggaccggtggtttttctaccacgctgaactataaaaactggtctttgtatggtcgttttgactatgcggtgggtcataccatttacaatgatttgaaagcaagaatcttggggcagtataacgggtcgttcaatttgattacggatgtcagaaattcgtggtctgaaaacaatacggaaactagtattcctaaattctattgggccgaccagaatgcgaaaaagaacattacccgttccaataatggtacaacgaatctgaacaataataactctactttctatgaaaagggggattatttgtgtctgcgtgaggtaaccttgagttataaattcccgaagaatcttataaataaggtgttcttgaccgatgcgtccgtgtatgttacgggacagaatttattctatattaccggatatgatggaacttctccggaaccggttatggatattcaggcaaatggtcgtggcggtatagacaatggacgctatcctacaccaagaaccgtcctgtttggtttacaattgtcattttaatgtgtaaaaaagaaaaggtatgaacataaaaaagataatattggcttttgccgcatcggctatgttggccggtggatgtacttcgttggatatggacccggtgagcgatatcactgacttgaattactggaaaactccggaacagtttgattcatttgtttttggactgcatagtcgcttcaggagccattcgtggaatatgtttttgttgggtgaggcaagaagtgatgtctttgggggaattcctttcggtggagaagctatccaggggatggaacgttttccttataatacattgaatgcggagaatcccggaatcagcgggtttggtgatttgtatcagaatatcaaccagatgaacttgtttatcagcagaactcttcatacggatgtgctgactgaaagtgccaggaattattatttgggacaggtgtatggattgcgtgcttactatatgtatcagctatatcgttcatggggagatgtcgtgtttacggaagagcctagcctgggttttgaagtgggtaaactggcaaaggcggcgactccggctgccgaaatctttgagcaggtaaaaaaagatatagaatcttcattaagttattttggatccgattataccataaaggaaaaaaaatcgctgtggtcaaaggctgccacattgatgctgaaagcggatgtatatctgtggagtgcccatcgtgacgggggagaaggagatgcccggacagcaaagaatgcgttggttgacatacagaataatatcagccgtagcaatctggacttgatggatacttatcagggagtgtttgcttatgataataaaggtaataaagagattatctttaccattcataatgaattgtttgaatataatctgtggaatggaaataatgatttgtttccacaggctgattatttagggaaattctataatgcggatggtactttgataaatacgtctgtcgagaataatttcggtatcatgcgcctgatggtgaaattggaaaacttcaagaagtttctgccgggagacacccgtcgtgacgttacattgaaagatgtatataataaggtggaaaatggcaagttggaattggtaggggtgtatccgcataagtattggggagttatgaatgggagtacacgggtgagatgtgatgattatcctatttatagatattcggatttgctattgatgctggctgaggcgaaagtgcttttgggtgaggatccggctacagagataaaccgggtgcgccggcgtgcgtttggtgatgcgtatgatgcttcaacagtggggtttcccaatcaggaagtcgataagcgtccggcggatgctgtcttgcaggaacgtttgtttgaatttatgctggaaggtaaacgatggtatgacttgaggcgttttggcgattcgtacgtgcttgactatactccggcggagcctgcccgtctgctttggcctatcaaccaaggagctcttactaataatccattgttgaaacaaacggttggttattaaatttttgtcggataagaatctttaattgcataaaaagacggtgttctttatgaaattaataaagaaaccgtctttttattttctaatttcaataaaaacttttatttttacacccgtaaaattataaatattatgagaaaccctagcttattactgctaattgttgtttttatattagcacccttcaagttgagtgcggcggcagatacggttgttgtccgcgaaacccggattcctgtgttgattgaaaggcaggataatgagttgtttcatttacgtatagaggctactcaaagtcagatgctgaatgaagtgaagttggacttcggcaaagacgtgaatttgaatgaaattgaatctgtgaaactgtattatggtggaactgaaagcgtggagaggaggggaaagacttattttgctccggtagattatatatctaataatactccgggaaaaacattggctgccaatacttcttattccgttttgaagtcggaagtgaaggccccgaagcgtgaggttgtattgaaagctgaccaaaaattgtttccgggagtgaattatttttggattagcctgcaaatgaagcctgttgcttctatcttgtccaaagtgtcggcagaagtggtggaagctaagattgacggacaggttgctcctttgaagatagcccgtaaggcggatacccattatatggggatcggcgtgcgtcatgccggtgacgacggggctgctgcctatcgtattcccggattggccacttcaaataaaggaaccttgttgggggtatatgatgtacgctataataatagtgcggatttacaggagtatgtggaaataggtctgagcagaagtacggacggaggtcagacttgggagaaaatgcgcattccgatggcatttggtgaatatgatgggttgcctaaagcacagaatggagtaggcgatccggccattttggttgataagaagacaggaactatctggattgtcgctgcctggacacatggtatgggaaatgggcgtgcgtggtggaattcacaaacaggcatggaccgtaatcatacagcacaattaatgatggtgaaaagtgatgatgatggtaagacttggtcggagcctatgaatataacagaacaggtgaaagatccgtcatggtatttcttgctgcaaggtcccggtagaggtatctctatggaagatggaacattggtctttgccagccagtatattggcaatgaccgtattcctaatgccggtattatatacagtaaggatcatggaaaaacctggaatatcagtacattggcacgcactaatacaactgaatctcaggtagcggaagtggaaccgggagtgctgatgctgaatatgcgtgataatcgtggtggcagtcgtgccgtttctacaactacagatttaggtaaaacatggaaagaacatgagtcttcacgtacagccttacaggaaccggtttgtatggccagtttgattagtgttaaagctaaagagaatgtattgggtaaagacatccttttgttctctaatccgaatgatgccaagaaccgtcatagcattaccatcaaagcaagtctggatggtggggtgacttggttgcccgagaatcaattgctgctggatgccggttggggttggggatacagctgcttgactatgattgacaaggaaacagtaggaattttatatgaaagcagtgtggcccacatgactttccaagcgataaagctgaaagatattattaagaccaaataaataatgaaacgcagattttctagttttattggtatgatactggtttgtgctgtaactatagcacaaaccagtatctcgttacttcctaaacctcagttgtataaggatacggggaagaactttactatgggaaaggtgaaactttctactccggtgttgaggccggagtgggaagtttttatcatgaatgcaggtggtgagattgttgaacactcgtcatcggtgattgaagtggaactggttccgtctattgaggaggccaggttaaatggggctgaagcctatcgtctttctgtttcaaacaagcggataaagatagaggctgtaacagaacagggagtgtattgggctatgcagacacttcggcaattggaacggaaaaaagggaagagaagttctgttgccggatgtgagattgtagactggccggcattccggatacgcggatttatgcaggatgtgggacgcagttatatttcaatggaagaattgaaaagagagatcgagattttatcccggtttaagattaatgtatttcattggcatcttactgaaaaccaggcatggagattggaaagtaaaatctttcctatgctgaatgatagtgtgaacaccatccgtatgccgggtaaatattatacgctggaagaggcacgcgatttggtggatttttgtaagaaacatcaggtgttgttgattcctgagatagatatgccggggcatagtgctgcctttgtgcgtgctttccgccatgatatgcaaagtccggaagggatgaaaatattgaaactgttgctggatgaggtgtgtgagacatttgatgtgccttatttacatataggtacggatgaggtggagtttaccaatccgcattttgtacccgaaatggtggcgtatgtacgctcaaaagggaaaaaagtaatatcctggaatccgggctggcactataaaccgggggaaatagacatgacacatttgtggagttaccgtggaaaggcgcaaccgggtattcctgctatcgattccaaatttcattatctgaatcattttgatgttttcggtgatattgtagctttgtacaacagccgtatttatgatcaggcagaaggcagtgaggacattgcgggaactatattggctttgtggcacgatcgtttgattgacaatgagtggaatctggttattgaaaatggcttgtatcccaatatgcttgctattgccgagcgtgcctggagagggggaggtacggaatattttgacggactgggtacgatacttccacccgaagacacggaagcattcaaagaattcgctgattttgaaaagcgtatgttgtggcataaggagcatacgtttaaaggatatcctttcgcctatgtaaaacagactaatgtaaaatggaatattacggatgcttttcctaatgggggagatatggataaggtgttcccgcctgaacaggagttaaaggatacctatcattataacgggaatacgtatggtgtacgtcaggcaataggggcaggtatttatttacgccatgtctgggggacgtttgttcccggattttatgccgatcctaaagaggatcataccgcgtatgcatatacttgggtatattctcctaaagatcaggaagtggggttatgggcagaatttcagaattatagccgttcggagatggatctggctccgctgcaaggtaaatgggattataaaggtagccgtatttggattaatgatagggagataatgcctcctgtatggacagcaacccatcaggtgaagagtaatgaaattccattaggaaatgaaaattgtgtggcacgttctccgctggctgtgcatttaaataagggttggaataaagtgttcctgaaattacctgtcggtaagttcaggatggaccagacgcgtcttgtgaagtggatgtttactgctgtctttgtgactcctgacggagaaagggcggcagagggattgatttattcaccagataaacaaaaataaaatgaaacgtattgtcttattgttattgggattattattagcgttaccccagtttgctcaggaacgcaagtattctactttttatgagcagagagcgactttgtttgaagaacttccggttacttcaaaagatattatttttttagggaacagtatcaccaacggttgcgagtgggctgagttgttccaaaataagaatgtgaagaacaggggtatcagtggagatatctgtatgggggtatatgaccgtttggatccgattgtaaagggaaaaccggcaaagatttttttattgatcggtatcaatgatgtttctcggggaacgtctgcggataaaattatttcagaaataagtatgattgttcggaaaataaagcaagaatctccaaaaacaaaattatatttgcaaagtgtattgccggtgaatgattgttacggtatgtttaacgggcatacatcacgctggcaggtggtaaaacaaattaatgatttgttggaaccattggcggtaaaggaaggagctgcctatattgatttgtatagtcattttgtggagaaagagacaggtaagatgaatccagtatatactaatgacggattacatttattaggaaagggatacttgctgtggcgtgatattgtaaaaccttatgttgaccagaaatgaagaagacattaatactgattttatgtttgtttctttgtaccgtttcatttgcacggaagcgggtgaaggttgcttgtgtaggtaatagcattacctatggcataggtgtatccgatcctgataaggagtcctatcctgcccggttacagcaaatgctgggtgaagggtatacggtggagcgttttggaaagccgggagctacgttgctgaacaagggacaccggccttttatgcaacagaaagagtttaaggatgcattggcttttgccggtgatgtagtggttattcatttaggagtgaatgatacagatccgcgtgattggcccaattaccgtgatttttttatagcggattatcgtgcactgattgattcgttcagagtggcgaatcctgaatgtcgtattttgattgcccgtctgactccgattgccgaccgccatccgcggtttgagtccggcacacgcgattggcatgatgagattcagctggctatagaaacgatagcgaaatacgcacaagtacagttgatagattttcatgcacctttatatccatatccttttatgttgcccgatgctgtccatcctgataaggaaggtgcggctgtcctggcaaaaacggtgtatgaaggcataaccggtgattttggcggtttgcaaatgccggaaatttatacggacaatatggtattgcagcatggacgtctgctgactattcagggaaaagcggatgccggtgagaaagtaactgtttccatagacaggcagcaacttcaggctgtgacgggagcagatggaaagtgggcggtggatgtccggccattgaaggcgggcggtccatatacgctgactgtttctacagaaaaacggaaactggtctatgaaaatgtgttggcgggagaagtgtggctctgttccggacaatcgaatatggagttttatctgaattggagtgcgactgccgcacaagatgttcctcaagctgcaaatagcaatatccgtttatatgatatgaaagcccgttggcgtacggatgcggtggagtgggatgcttcggtactcgattcattgaatcatctgcaatattataaggatacacggtggacagtttgttcgcctgaaacagccggtaatttctcggcggtggcttactatttcggaaagaaattgcaggatagtttgcaagtccctgtaggactgatttgcaatgccattggcggatctcctactgaagcatggatagaccgtagtacattggaatatcgtttcccggctatcttacgtaattggatgcagaatgattttatccaagactgggtgcgtgggcgtgctgccttgaatgtaaagcagtcttccaataaattgcaacgccatccttatgagccttgttatttgtatgaatcgggtatccgtcctttggaacagtttccggtcaaaggctttatttggtatcagggtgagtctaatgcccataatcgggaggctcatgaaaggttgttcagattgttggtggaaagttggcgcaagaattggggggatgcggaacttccattctattttgtccaattgtctagtatagaccgtccgtcatggacttggttccgtgatagccagcgtcgtttgatggcggagattcctcataccggtatggctgtcagttcagataggggagactcattggacgtacaccccaaacagaaaagagaagtcggtgaacggttggctgcatgggctttgaataaaacatacggatataaaaatgtcattccttcgggaccgctttataaatcagtcgtatttagtggaggtgcggcttatatttcttttgattatgcggaggggttgtccacttcggatgggaaaccgcttcgtacattcgaagtggcaggtgatgatggattattttatccggcacaggctgttgttgaaaacggtaaaataaaagtatggagtgacaaggtgaaagagccggaaacggttcgttacggatggcagccatttacccgtgccaatctggtaaatggcgccggtttgcctgcatccacattccgggctgaatagtatataaattaataaagataggtaagatgaagaaaacattaaaagttttgatgatgttaggatgctttccgatgatgctcagtgcaaaggagtataagaaatcagagagtctgagtcttgataagggatgggagttcgcccaggtcggccggaacgaatggttgccggctacggtgcccggaacggtgcatcaggatttgatttctcataataagctgcccaatccattttatgggatgaatgagcaaaaagtgcagtgggtagagaatgaggactgggtctataaaactacttttaatgtgacggatgagcaactctcgcgggatgctgccttgttgattttggaagggttggatacgtatgcggatatttacctgaacggctctttgttggaacgtacggacaatatgtttgtcggctatactcttccggtaaaagaggtgttgcggaagggagaaaaccatttgcagattctgtttcattcacctgtcaagcaaactttaccccaatgggaaaccaatggttttgattatcctgctgataatgatcatagtgataaacgggttagtatctatagccgtaaagcgccttacagttatggctgggattggggaatccgcttggtaaccagtggtatctggcggcctgtgacactgactttctatgatgtggcacgcattgatgattactatgtacgtcaggcttcggtaacaaaagatctggcgaaagttgaaaaccgcctgactgtaaacagtgtttctgcaactcctcagaaagcggaagtaaccgttgcttattcttataaggagggtgaaaaggtaaccgaacagaaagaggtgacattgcagccgggaacaaaccatattcttcttcccatagagatacggcagcctcatttatggatgcctaatggttggggggaacctgcattgtatgactttgaagccgtaataaaggtggatggtaaagtgatagcttctcaaaaagagcgtatcggactccgtacaataaaggtggtgaaagaaaaagacgatcagggagaatccttctattttgtagtcaatggtgaacctatgtttgccaaaggcgcgaattttatcccggatgatgctttgctgcctaacattactgaagaacgttaccgccagttgttcaaggatgtgaaagatgccaatatgaatatgattcgtgtatggggtggaggaatttatgaggatgatgctttttatcaggcggcggacgagaatggaattttagtttggcaggattttatttttgcctgcactacttatccgtccgatcctgcttttatgaaacgggtagaggccgaggcggaatataatatcaagcgtttacggaaccatgccagtctggctatgtggtgtggaaacaatgaaatttatgaaggtatgcgctactggggatgggataagaaatacactgatcccggtattatggaaggaatgaagcagggctatgacaaacttttccgtgagttgttgcctcgtaaagtagctgaacttgatccggaccgtttctatatgcatggttctccgtacgaggccaattggggacgtcccgaaagttggaagattgcagacagccataattggggtatctggtatggtcagaaaccgtttgaaagtctggatacggaaattccgcgttttatgagtgagtttggttttcaggcatttcctgaaatgaagacgattgctacttttgcctcaccggaagattatgcattggaatcggaggtgatgaatgctcatcaaaaagccactatcggtaatttcctcatcaagaagactatgggactgtattataaagtgcctgaagatttcgatcagttggtttatatgggtttggttttgcagggggtaggagtgcgccagggtttggaagcccatcgtcgtaaccgtccctattgtatggggactttatattggcagctgaatgacagctggccggtcgtttcctggtcgagcattgattattatggcaattggaaagcgttgcattatcaggcaaaaagagcttttgctccggtattggtagatgctgtcaaggaaggggaggatttgaatatttatgttatgtcggacaagctggaagcggataaagaggtgactttattgttgcgtgtgatggattttaatggaaaagttctgactaaaaagagtatcaagggtgaggttccggccaatgcttccaccttatattataaggaaccttatgcgggtataacaacaagtcctcaaaatacttttcttctaatgacattaaaaaataagaaaggtgaggttttatccgaagaaatttattactttaaccacgcaaaagatcaggagcttccgaagactgagatccgctataaagtgaagccgatggatggaaaatatgaagtgactctgtctgccagacagctggctagggatgtgttcatagagattcctgttcaaggtgcgagatttactgacaacttctttgacttgttgccgggacagacaaagaaagtgattattacttcagataaactgaagaagaatgaaaaggttgatataactattaagcaattaagtgatactaactaatcaattaatatctattatgaaaactttaatgggccttgcagggctgacaatggcaggttttatgcttttatcctgtaacacagaagtgaaagaagcaaattatcagataattccgttaccgcaggaaatttcggtaatggatcaggctgctccgtttattttgtcaaatggaactaagataatgtatccggaaggcaatgaaaaaatgcaaaagaacgctgaatttttggcaagttatatcaaagatcttaccggaaagtcattggctgtacaagccggtacagacggcaaaggaataatcctgcaattaggtggaaatgctgaaaatcctgaaggataccagttaaaggtaaccagcgaccaagtggttatttcaggacctacggaagccggagtattttatggcatccagacgttgcgtaaatctattccggtagcacaaggagtggatatcgctttaccggcggttgaaatcaatgactatcctcgtttctcttatcgtggtgcaatgttggatgtgtcacgtcattttttcccggtagattcagtaaagcgttttattgatatgctggctttgcacaacatcaaccgtttccactggcatttgtctgaagaccagggatggagaatcgaaatcaagagtcgtcctgaactgactgaaataggttctaaaagagcggaaacggttatcggacataactcgggaaaatatgatggcaagccttatggtggattcttcacacaggaagaagcaaaagaaattgtagcttatgctgccgaacgtcatattacggttataccggaaattgatatgccgggacacatgcaggctgctttggctgcatatcctaacttgggctgtactggtggtccgtacgaagtatggaaaatctggggggtatcagaagatgtgctttgcgcaggaaatgatgaaaccttgaaattcattgaagatgtattaggggaaattattcagattttcccgtcagaatatattcatgtaggtggtgacgaatgtcctaaggtacgttgggcaaaatgtccaaagtgccaggctcgtatcaaggctttaggtcttaagtctgacaagaatcatactgccgaggaaagattgcagagtttcattatcaatcatgcagagaagttcctgaacggacacggacgtcagattatcggttgggatgaaattctggaaggcggattggctcccaatgccactgtaatgtcatggcgtggtgttgccggaggtattgaagccgcaaaacagaaacatgatgtaattatgactcctaatacttatttgtatttcgactattaccaaaccaaggatattgctaatgaacctgaggctattggtggatatgtacccgttgaaacagtatataactatgagccgatgccggctgatctgactccggaagagcagaaatacatcattggcgtacaggccaacttatggactgaatacattcctacctacagtcaggtagaatatatggaattaccccgtatggctgctttgtctgaaattcagtggaccatgccggaaaagaaaaactatgaaggtttcttgaagcgtttgcctcagttggtagatatttatgatgtttataaatataattatgccaagcatgtctttgatgtaaatgctgtatttactcctaatccgaaagatggtacgctggatgttactttgtctactattgataatagtcctatctattacactttggatggaacggaaccttccgctgcttcccagttgtatacggaaacattgaaattgaaacagaattgtacttttaaagcgattactgtacgtcctgcaggaaatagccgtgtggttacagaggaaattgcttttaacaaggctagtatgaaacctgtcactatgttgcaaccggtaaacaagcaatatgaattcaaaggcgctcccactttggtggacggattgaaaggtaacggtaactataagacgggccgttggattgctttctataaaaatgatatggaagcagttattgatatgcagcaaccgacagaaatcagcagcgcttctatttctacttgtgtggaaaaaggtgactgggtgtttgatgcccgtgctttttctgtagctgtatccgaagacggaaagaactttaaggaaattgcttcagaaaaatatccggcaatgaagcaggatgacaagaatggagtgttcaaccatacgttgactttcgatccggtgactgcccgttatgtgaaagtgaccgctttagcggaacatagcattcctgcttggcacggtggcaaaggaaatccggctttcttgtttgttgatgaaatttcattaaattgatagttatattcaaataatgactgtgtgccaaaagtgtgatagagtaccgttgggcgtgaggtggaatgcctccgtccatatgcgtaaggaatgctgtgtttgcgttggtgcaatccgtttctggggcaagcgggatggctgatttgcttttggcacactttttattatttgcttcaccatgaaaacatgatcagaaaaataatatatggcgtttatgcgatactgggcatgatgacaatggctgcttgtagcggtcaatcggatgcttctgaaatatctcttgagaaaatgcatgggttccctacagagaataccggttttcttaagggagtttctgcattatatgcgggagtgattgaaggaaatttgctgatagccggaggttgtaatttccctgatataccggtagccgatggaggaaaaaaagcttattatcgggatatatatatcgcccctttgtcaaatgatacggcttttgagtggaagaaaataggccaactgcctcaggcagcagcttatggagtcactatttctactgaaaaagggttaatttgtgttggagggactacggcaacacacagcttgtctgatgtttttcttttatctttgcaaaaagacaccttgaaaagagatactttgccctctttgcctgtaactatggataatatggcaggtgcattagtaggacattcactatatattgtcggtggaaatgtaaatggcattccatcctcggccatgtacatgcttgatctgtcggatttgtctggaggatggaaaagagaaacagatattccgggtgaacccagagtacaatctgtttgcgtggcacaagatggaaaactttatgtgtgggggggatttgccccggctgttgaagggcatcaggcttctttgtcagtagatggatatatgtattctccggaaacgaaagaatggtcatcggttgccaccccgtatgatgcggaaggtaatgagatctctttaggtggtggaatgggaacctcttttggcgagggtatgatattgtgtgccggaggagttgataaggatatattcttaaaagctctgcaaggtatttatgcgggaaaagaatatttgtcacatcctgtagagtggtatcggtttaatagaaacctgctgctctatcatccgcagacggataaatggactacattaggcgaatatgaacaaggtgcgcgtgccggagctgtaatagtttcgcaggacggatttcattacattattaatggagaattgaaaccaggcattcgtactaatgaaattaatagaattaaagaaaagagaagatgagaagattgattatattggcggaagttgcattgggcttgctgtttgcaagttgcacgaaagaagagcaacgcacactttctgttattcccgcaccattaaaggtggaattacagcaggaagtgttttcattgaattcggaaacagggttatatatagatgcgtctgagggggacaagaagattttggaagattatctggtggcttcttccatgaatttgaaaccggtaatagcagaagagggacataatgttgtcttgaaacaagtggcggaactgccggaggtaaactcttccgagggatatgttctgacggtaactcctgatcaggtacttattcgtgcaacttccggggcaggattgttctatggagttcagactatgctgcaaatggttgatgaaaaaggattgccggcaggagtcattacagatgaaccccgttttgcttatcgtggctttatgatggatgtttcccgtcatttcttcgataaggaatttataaaaaagcagatggatgctttggcatattataaattgaaccgtctgcatctgcatcttactgacgctgcgggctggcgtcttgaaataaaaaaatatccccgtctgacagaatttgcggcatggcgtgagtttcctacctggaaagaatggtggaataacggacgacggtatgaagaagaaggcagtaaagatgctcacggaggttattatactcaagatgatatccgcgaactggtggcatacgctcaggaacgttttattactgttattcctgagatagagatgcctgcgcattcggaagaagtactgactgcttatcctgagttgtcttgtacacacgaaccttacaaacaagccgatttctgtgtcggtaatgaaaagacttttgagtttctggaaaatgtgttgacagaggtaatggaacttttcccgtccgaatatattcatataggaggggatgaggcaggtaaagcctcatggcccacttgcaaactgtgccaggcacgtatgaaaaaagaaggcttgaaagatgtgaacgagttacagagttatctgattcatcgtattgaggtctttttgaatgcccacggacgtaaattattgggttgggatgaaatattggaaggtggtttggcacctaatgccactgtcatgtcatggcgtggcacggaagggggaatgaaagcggttgattccggccacatggctattatgagtccgggtgagttctgctattttgattcttatcaggatgctcctgattcccagccggaagcaataggaggctatctgcctttgtccaaagtttattcatttaatcctgtacccgatactttgagtgcggataaagtccagttggtgtatggagtacaagctaatttattcacagaatatattccgactccggaacatgcggaaatgatgatttatcctcgtattcttgccttggcggaagttgcttggagtgccccttctgtgaagaactatgatgattttcatgttcgtgcattgaaagaggtagaggcattgaaagctgaaggataccatccttttgaattgaaaaatgagataggaaatcgtccgggagcggatcagcccgtacagcatttggcagtaggtaagaaagtggcttacggaccggatgccgcttattatcccggctattcggccggtggtgacagtgccttggtagatggtgtgatcggaggctggacttatggtgacaggcgttggcaaggttttatagacaagaaaagaatggatgtgaccattgatatggaaaaagaaacagaaattcattctgttggagcagactttatgcaggtgtgtggacctgaagtctttatgccttcagaagtgatcatttccgtttccaatgatggtaaggagtttacggaactgaagcgcatggagcataaagtagtgaaggatgacaaagtgactttcatcaactttggttgggaaggaaatgccaaagcacgttacatacgttatcaggcatcttcgggcgaattcggaggtttcttgtttacagatgaaattgtagtgaaataatagaacttatataaacaacaaatagcatgaagaaacaaattttgttatcggctgttctggcttgtatctcagttttttctgcggcagcacagaaagagccggtagattatgtaaacccttttgtgggtactactaattacggtacgacaaaccccggagcattaacccctcatggaatgatgtcggtgactcctttcaatgtgatgggggttcccgaaggggataaggataaagacaagcaatggtggtccactccatacgaattcaataataaatatcttaccggctttgcgcacgttaatcttagcggggtaggctgtccggaattgggatcattgttattaatgcctaccaccggcaaactggatgtggattatcataattatggaagcttctatcaaggtgaaactgcaaatccgggttattataccaatatactggataaatacaatgtgaaatgtgaactgactgccactccacgtaccagtatggcacgctttacttttcctgccggacaaagcaatatcttgttgaatctgggagagggattgaccaatgagagtggtgctaccgttcgttttgtaaacgaccgtgagattgaaggtaccaaattgttgggaactttctgttataatcctcaggcggtatttcctatctattttgtaatgcgtatcaacaaagtaccggcaaaacgcggttattggaaaatgatgcgtccgatgggtgtggaggcgcaatgggatgatacggccggtaaatacaaactctatactgcttatacaaaagaaataagcggagatgatataggagtgtggtttacttacgataccacggcggaagaagtgattgaagtcagtatgggcgtgtcttttgtcagcatagagaatgcccgtttgaatctggaaaaagaacagcctttcggtacaacattcgacaaactgcgtgcggaagcccgtaagaaatggaacgatgatctttcccgtatcaaagtggaaggtggaacggaagagcaaaaaggagtattctataccgctatgtatcacacgatggttcatccgaatattttgcaggatgtaagcggacaatatccacaaatggagggagataagattttgaccaccaaccgtaaccgttacacggtattctcattgtgggatacttatcgtaactatcaccagttgatgactttggtatatccggagcgtcagatggatatgattcacaccatgatgggcatgtacaaggaacacggatggttcccgaaatgggaattgtatggtcgtgaaacattgacgatggaaggtgacccttctattcctgttctggtagacagttggatgaagggattgcaagactttgacattgacgaagcttataagggaatgtataagtcggccactactccgggcaaggataatctgatgcgtccggataatgatgattatatgtccaaagggtatgtgccgatggaaagtcagtatgataattcggtttctcatgctttggaatactatgttgccgactatgcactttctaccttggcggaggctttaggtaagaaagaagatgcgaaattgttccgcaaacgttctatgggctataaaaattattatagcaaggatttcggaaccttgcgtccgataactaaagaaggcaaattctatgaaccgtttgatccgaaagaaggagctaattttgcacctagtcccggtttccatgaaggtaatgcatggaattacactttctttgtgcctcatgatatcaatggcttggtaaagttgatggggggcgacaagaaatttgttgataaattgcaaagcgtgtttgatgaagggaattatgatccggccaatgaacccgatatagcctatccttacctgttcagtcgtttcaaaggtgaagaatggcgtacacagaaattggtgaaggaattgctggctaagtatttcacaactaagccggatggaattcccggcaatgatgatacgggtacgatgtctgcatgggctatattcagtatgatgggattctatccggattgtccgggtgtgcccgaatatacattgaccactcctacttttgataaagtgaccgttcagcttgatcctaaatattggggcaagaaagaattggttatcaagaaagaaggacaaggggattatataaaggaaatcagactgggcaataagaaaattaataaatatttgatttcgcatgatgatttgatcaaggcaggtgaaattacttttatagtaacagaaaatcctaataagaaataactatgaatacgaaacgatttttgtgtgctgcgttaggagctgtttgttattttgcttttttgcaagcgcaggtacgtacagagcagactttcgaaaaagggtggaaatttacgcgtgaagataatgcggaatttgccaatcccggttataatgacagtaaatggcagaacgtcaccgttcctcatgattgggcgatttatggtccgttcagtatcaataacgacaagcaggaaatggctattactcaagatggacagaccgaggcgatggaacatgccggacgtaccggaggtcttccgtttgtaggaaccggatggtatcgcctgaactttgatgctcctggttttgagaaaggcaagaaagcgactttgatatttgatggagcaatgagccatgcccgtgtttatgtgaacgggcaggaggccggttattggccctacggttataattctttttatgtggatgcgaccccttatctgaaactgggtgagaggaacgaactggcagtccgtttggaaaacgagcctgaatcatcacgttggtatccgggggccggattgtaccgcaatgttcatctggtaatcaatgaagatacgcatattcctgcttgggggacgtatgttaccactcctgtggtgacagacaaatatgcaaaagtgtctttgaaaacttctttggttagccctgaaggagctaataaggataattaccgtattgtgacgcagatcaaggataaaaacggcaaagtggttgctaccggggaaaacaagttgagtgtttttgataatgctttgtttgaacaggagtttgcagtggctaatcctgagttgtggagtcctgatactccggttctttatacagctgaatccaaagtatatgaagggaataccttgaaagacgaatataccacccgctttggtatccgtactttggagattgttcccggcaagggctttttcctgaatggaaagctgaccaaattcaaaggggtatgtaaccatcatgacttgggtccgttaggcggtgctgtaaatgatgccgctatacgtcgtcagattcgtattctgaaagatatgggttgtaatgccatccgtacttctcataatatgccggcacccgaattggtggaggcttgtgatgaaatgggtatgatgctgatggtggagtctttcgacgagtggaaatcggcaaagatggccaacggttatcataaaatatttgatgaatgggtggagaaggatctgactaatctgatccgtcattaccgtaacaatccgagtattgttatgtggtgcatcggtaacgaagtacccgaccagtggaatggcaataacggaccaaagctttcgcgtatgttacaggatatctgtcatcgtgaagatcctacccgtcctgtaacacaaggtatggatgcgcctgatgctgtagtaaataataatatggctgctgtgatggatgtggccggtttcaattaccgccctcataaatatccagaaaactataagaaattgcctcagcagattattctaggtagtgaaacagcttctacagtaagttcgcgtggcgtctataaattccctgttgtccgtcaggctatgaagaaatatgacgatcatcagtcttcttcttacgatgtggaacattgtggttggtccaatttgccggaggatgactggatttggcatgaggataacgcatggggtatcggagaatttgtatggacgggcttcgattatttgggcgaaccgactccttattatactgattggcccagccattcttctttgttcggtatcatcgacctggccggattgcccaaagaccgttactatctgtaccgcagtcattggaacaaagatgaagaaacgctgcatatccttcctcattggacatggccgggacgtgaaggagaagtgactcctatctttgtttatacaaattatccgtcggcagaagtgtttatcaatggcaagagtcagggtaagcgtaccaaagatttgactgtaacggctgaaaatagtgcggattctgcttccatagcagatttcaaacgccagaaacgctaccgtttgatgtggatggatacaaagtatgagccgggaaccgtaaaagtggttgcctataatgataagggggaagctgtggccgaaaaggaaatccatacggcaggcaagcccgaccatatagaactggttacagatcgcaatgaaataaaggctgatggcaaggatttgtcatttgtcacagtaagagtggtggacaaagagggtaatctttgtcccgatgcgcagcatctcatcaagtattctgtaaaaggtgcgggaacctatcgtgccggtgcaaacggagatcccacttcattggaacttttccatgttccgcagatgaaagtgtttaacggaatgatgactgctgttgtgcaaagtactgataaaccgggagaaatcatattgaccgcaacaggtaaaggacttaaatcaggtaggctagttttaatgagtaagtaaaaagatttgtttcaatttccactatctgtgccccgcttgattttattaagcggggcttatttattaaaaaaagttggaaaataattggggaaatctgttttagaaagtgaaaaagttgctatttttgttggcaaatttaatatgccaattaaaaattctaacttatcatagtatcatgttgacccaaatcattaacgcaaagattcttaccccacagggctggttgaaggacggatctgtccttatgcgcgacaataagattttagaagttaccaattgtgatttagctgttatcggagccgagctgattgacgctaaaggtatgtatgttgttcccggtggtgtggaaatccattgtcatggtggtggtggcggtgattttatggaaggtacggaagaggctttccgtacagccattaatgctcacatgaaacatggtactaccagtatttttccaacgttgtcttcttctaccgtaccgatgattgaggcagctgccgaaacttgtaccaggttgatggcggaaccggacagtccggtacttggtcttcatcttgaagggcattaccttaatatgaagatggcaggcggtcagatgcctgaaaacataaaagacccggatccgaaggaatatatccctattgtagagaagtggggctgtatcaagcgttgggatgctgcacccgaattgccgggtgccatgcagtttggtaagtatatcacaggaaaaggcatcttggcttctgtggcacatacacaggccgaatatgaagatatccgtgcagcctgggagtccggttattctcatgctacacatttctataatgcgatgccgggcttccataagcgccgtgagtataaatatgaaggtacagtagaaagtatctatctgatagacgatatgacagtggaagtggtagccgatggtattcatgttcctcctactatcttgcgcctgatatataagattaagggtgtggaacgtgcttgtgttattaccgatgctttggcatgtgccgccagtgaaagcaatgtagcttttgaccctcgtgtcatcattgaggatggtgtgtgcaaactggccgaccgttctgctttggcaggcagtgtggctaccatggaccgtttgatccgtaccttggtgcaaaaggcagaaatcccattggaagatgctgtccgtatggcttcggaaactccgtccaggattatgggagtatatgaccgcaagggctcacttcagaaaggcaaagatgccgatatcttgattcttgaccaggacttgaatatccgtgccgtatgggcaatgggcaagctggtcgaaggaacttgtactttgtaagaaccggctgaataagaacggaaacaggactttataaaatctcctttcacaccaaacggattataattctattgatttacaatttgttatggtgaaaggagattttctttaattataaaaacaatgcattatgaacaaatatttctttaggttttcattctattttttcatggtagttcagtggtaaaaccactgttatatttgtttcatcatgatagatgaatcagcttttagtattgcataatatatcctcttctatctcttctgttgtttcttcatggtattctttgtaaatacccccttcgttcagatagtggataatatcacatatttcccttagcgaggcaatgagatgtgaggaaattatcaccgtcttttcttttgctttcagttgccggatgagtcttttcatcaggatacatcccttcaagtccaccccattgaacggctcgtcaagaataaatacgtcattgtcttgcaacaataatgccataaatcccagtttctttttcattccggtagaatattcggcagcatacctgtcaaggggcagttggaaaatttcatttaaatgttgaatggtgggtgtattgaccggcagacctttggccttcatacagaattccaagtgttcaagacccgtgatttgggaataaaagaagttggatgcagacagataacctgtttttaaagttttgcttttggttatgcttccggtataatcatagattcccattatacaattgaataaagtagtctttccggctccattctcgcccaccaagccatatatttttccggggtgatactccaaatgaatgccgtttaatactttgaccttaccgaaacttttatgtaaatcattcacttctatcataataatctttttaagcgtttgtgcgcatggcaggtcagcaatgctgtaagtgctatgccgggtattaaaataattggaacaaaaagagagcctaaataaaaaggcattaatatacttaattgcacaataaacagcaataggggggatgggatgatatggcgcaacataccgataccaatggcataaattaaggtggcggtataataagataagaaaaagaagatttcatcttggtcataggtagacgctataagcgctaagctgaaaggaatggaggtgatgaaaacattccatgctatgctttttagttggaaaaggcataaagtcttgaaatttttgaaatgaagaagatatctgttgtccattgtttgcagatagcctgatgcctgtaccaatccccatagtatgagacatactttgtttatttttatatttccgtgtacggttcctgcggttgcaaaaagaaagagtaggatatagacccagaaagattggcggaatattcgtatatattcataacttcctttgtaaagaaaaggaagacggacaggtttgtgttccggttttatttctttcaggaaaggtaataaggcggcgaacagccataagccgatagcgtcggtaaattgtccttttattatttctattccggcaaaaggtaatgcgatcaaggtgtattcttttatcaggaacccagaaagatgaggtgttaaagtgcgtaaaaactctttgtctttccggacattatgataaccggctaataagagaacgcataccacaggaatagcgaaacggttttctgccaagaataatatcatgatggcagccaccgttaagatggtaaggaagactattctgaagatacccaattctataactattcttccaaaatttttcagacgaagcagcagatacagttgaaacataaagtgctttttattctgattgagggtacaaaggaataaaatatccggctaagtaccctcactgtaaagtgaaaatttattctttatgcttctttttcagttccatcaactctttattgacgtgtgtcaattctttaattctgtccgatacatgatggaagaggaagtagtctgtcagtacacctgctaagattaaaccaaacattgttatcatgagccaccacaggtggcggtaggtgtaaaggaatatgcatataaaaggagttaccagcaaatatccgatgatataactccaattgataagcattttatatcggagtatattctttatttgcatttcaaggtttgtttctttttttattttagtcaataaaataactcctgcaaagttgactgtaagagcatatagcagaagtccgaatattgccggccaaaacactaatttaccgttcaaatgaataaaatcaacgaacattagaatcgttactcctaacataaatatagaagctattttgtccatcctcagcattctttgcaggcaactttctttttgccgtgacaacatctctataatctgttgctgatgaaccagttcattctggctgacccgttcattcaactctttccatgctttttgcaattcttcaagttccatataattgtatgattacaagttcgacatattttttaatttctcttttatacggtgcagttttatcgcgacattattgcggttcgttccggtgatttcggctatttcatcgtatgatttctcgtccagccagagcaggataaacatacggtccaccttgttcagtcgtttgatgagtgaatacatttctttcagcagttcgttgtgttcacaatcttccagaatatctacctgctgttccaaaggtacatagtcatacttctttttctttcggaagtccgagatacacgtgttcagggatatgcggtaaacccatgtgacaaacgaactttccccccggaagtttttgtatgacttccatatattgaatacagactcttgaaaaaggtcgttcacatcgtccttgttgtctgcatacatgaagcataccttgtaaatgatgtgcttgtattgcactagcttgtcggcaaattcctgttctatactcatcagctttcaaaggtgtttttattaggttagtcggtgaaaagaagagaaagttacacctttatgctataaaagtctttgtattgaaagtaggtattacaggtctgttctttcaaatgcaatgatttgtaattttcttgatgtagcaggctggattactttttgcggacgttaaagcatttgtcgaaaaagtcttttttatttttcccgtaaaaactactgtccagtcctttccatgtcttgggaaatatctttttagtgagttccacctcttcttcaagaatcgcaatattatcagtcatcaatgccatgttcagtgcgcggttgatgcgggaaccggcatacctgaggctgtctgtagcatattcttttatgaggatggcataggcggaatcggcagaccgataatttttttgggcggtaaggctgtctccgaaataatcttcaaacatcgctttcattgaccataagtcggcattgagggtggattgtttttcagcttgccggagtacagacagaatctcatggtactttttgcaggctgataaataactgattcttcccacatatacttttatattggtagggtcaatggctaatgcgctgtcaagtttggcccatatttccttgtcgtttatagatatatgttcactgtcattaaagaagaaagtgctgtctaaaggaggcaaccataggttcctcgcttctgctaccagacggttggcttcttgggtgtggaagttttcttcggtagttacggggttggaatggtgtttgcatgaaacagtaagggtcaataataagccaagtaaaatagtggttttcatcagtctgtgtattatggtattagtttgttgccaacacaaaaataggataaaaaaatgatattctttcttttgcatcaaatatatttcctttgatgtttggttataaaccgttctgtctgtccgcagaatacaatgaaaccgttgttctccgcagatacccaatctttttatcagggtatcttcctgtatatcgcgtatccttttgtttattcatttagttttttaagaatgggtcgactacctgattatttttctccttaatccatcttttcctttatattaagcctttttcccctaaagattaagtatctttgtccaaatgtgttctatctccataggttgcggagttgactccataacctttggagataactccatagcctttggagtcaagtccaaagcttatggagatagaatacaaaaggaagagaacccttaaccatagagcagaaagggcttggggatacagatcaaatcttttaatgatggatataaaatatgatttcaaggccaaccctttcaaggaaaaggacggcaaaccggtgctttatccggcggtagtggtgaaggaaacgattactaccgatcacatagtgaaggagttgtccaagcatagcgcatattcggcgggctgtgtggtgggagtgctacaggaggtggccgatatggttgtatcccatttgcggcaaggaaaaaatgtgcggttggacggcctgggtacgttttctcttgccttgtcctcgcgtgaggtgacagaccggaaggagatacgtgcggcatccgtgaggataaagaaggtgaacttccgtccggtgccggaactggtgaagcgggtgcggcaggaaacagacatcctccgtgccgagttcggcttcttgcctacggtgaaaaagcgtagcaaggaggagcgttggacgttgctggaggcttatctgaaagaacacggttccattacacgtctggtctattcggaatggctgggggtggcgcgcactacggcggcctacgagctgaaggcttggtatgaggagaagagattggacaaagaaggaaagcattctcatgcggtgtatgtgctgcgcaagcaggaaggtatagccgaagtatagccccttttttatccgtttgggaataaaaagagagggaaagtggtggtggcagcactttttacccataaaaaaatgtgctaccaccacccgttgaaacgccttgttcatggtggttccagtagagtgggtggtagcagtggcagcacatttataaaactctggagaaggagggattgcttgtatttgtactcaatctgaactcggaacaagagacttacagcttgtcatgcaagacccccgccgctttcagataggccacgtagttcagataaagttggaaacgggcgtcaactttcgtttcgtaagcctgttgccataacgcttgggcttccaaatggtcggagagtgtttccagacctacttcgtactggcttttgctgacacgcctgttctcttccgcctgttgcagggaacggtcggcaagttcgctttccagctttgcttcgtccagattgttggcggcttgggtcagttccagtaacatttgctcgttcaggttttgctgttgaaggcgggtctgttccagtttggctttggctgcacgtactttgttgctgcgttctccgaaatggaacaaggggatgcttacattcagcaggacagagaaactggcgtcgtccaggaaattcttgttgttcagttccaaaccatgcacatagtcatatgagcctttgatccctactttgggaagcagttcactgcggttcagtttcacctgctggcgggctatcgccacttgtttgtccagtattccgtattccggacggcgggtgatatccagtacctgtacttccaggtctttctctatctccgggaaatctccggaaacatgaacttgtgtggtcagtggtttccctatcaggtggcagaggttcatggtagccaggcggagagcattctcggcttttcggatacctagctcgctttcattcagctttacttgtactttcaatacatcattctgaggtttaagtccatgtttgtaagcactctctacgttattttttaattccgtcaatacagcgtggtatgcatcggctactgttttcatctcctttgcttttactaccagagcgtatgcctgatctgttttctgaatgacttctgttgcggtcagattttcattcatttgtgccatttctttgcccagcaaggacattttgtaggcggcacggattttaccgcccatgtagaggggctgttccatttgcacaccgcccatatagacccatcctattttatagtccaggttaatgccggggaagtaggcaaagcctgcgggttgtcccggattgaactgtcctgttccatcgggcagaaagacgggcaggttgcctccggctatgccgtaactaccgtcggcattactgtaaagtcctgttccgctgacggtgaagttggggaagaagttccctttgtaactcttggcagtataacgggcactttccgtctgtttcacggaagccgccatttccttgttgtattttaatgccatttcgcggcactctttcagactcagtgtttcctgtgcccatgcgggggtggcaagatgccacagcagacagcagagggggagtatcattgtctttttcatttattctcggttttgtatgtcagtgaaatgaatcaattgttttttatcttgaagaacaaggcatataatatagggataaagagcagcgtgatcagtgtgctgcacagcaatccacccatgatagctgccgccaaggaaccgaacatggcatcggacagcaagggaatcatacccagaatcgttgtcagcgaggccatcatgaccgggcggagacggctttgggaactgtctatcagtgcggtgatcggttctactccttcattgatctgaagggtgatttcatccatcagcacaataccgtttttaatcagcatgccgatcaatcccaatgtgcctacaatagccacgaaattgaagacttttcctgtgagcagcatgaccgctaccacccctacaaatatcatcggaatacagcagaagatgatgatgggtttgcgataatctttgaacagcatgatgaggatggcaatcatcagaatgatggctaacgggaaattttggaacagatacttcatggactggtcgctggctattttttctccttgccataccagtgaataaccttcgggtaatggtatgttttctatctgttccgcgatggcaagacgtgctttttccgtttcaatgccgggtgcgggcgaacattgtgcccgctggcttctctgcccgttgtaacggggaactaccggatcttcccaccggatatcaatctctttgctgatttgtttcagcggtgtgcttcccatgatgctttccaccaaatcttctttcgaaagtgtgccggctttcagcttcaccatggtttcctcgttcaacagtccgttcagggaaggcagagacgagaagacttgtgcgttgcccaggtcctctatcggttctcctttctcgtcgaggcatttcaggtagatgttgtttttgtggataccttcgtagaaagagccgataggaatgcctccggtggctgtgagcagggaaaggctgacatcattacggctcaggccgagggcacgggcggacggctggtcgtattcgatggtcagtacgggtacttgaggttcccagtcggtggtgatgaggcagacttccggagtcctttccatgatggcgcgggcgctgtcggccagttggtgcaggatggcaggatcgggacccagaaattgcgcctctatgggatatttcttgaacatcagattatatcttttcaatttgatgtatgcgtccggataggcttgggagaggtaagcttggatttcgtctatatgttctaccaaggtttccggtgaggtgaagtcgataatcagttcgccgtacgaaagtgaggggttggcaatgctccgtaccagattatagcgtccgggcgtaccgcctatggaggtagtgacgtgggttatttcctcccgtcctttcagataggtttctatttcttccaaatctcgaaccacacgtgtatagttattcccttccggaagtttgtattccatataaagctggtcgtaaaccatgtcggggaaaaagccctgacgcatatattggtagccgaaaacggaaagcagcaacagaccggtcatggcaaatacaaaactccaccggtgggccagaccgaaccgcagtgccgaacggagggtggcatagattttacctttgtatactcgctttccggtactgtcagtatctatggcaggatgcagccggcggtcggccatcagtggtacatggatcagtgccaatatccagctcagtaacagggaaacggcaagtacgatgaaaaggtcgcgcgtgtagacgcctgcggtgtcgggggacatgtagatgggtagaaaggcgatgatggctatcagtgtcgcgcccagaagaggcatggctgtctgtcttccgatggcggtcatggcttccatccggtttttgccggccttcaagtctaccagtatgccgtctatgatgacgatggcgttgtctaccaacatgcccattgccagtacaaaagcagccaatgatacgcgctgcatggttccgcctgccgaataaaggaacagaaaagaaccgaatacggtgatgaccaggctgatacctatgataaggccgctcttgaaccccattgctatcatcagtatcagtactacgatgatgacggattctatcaggttgatgacaaaggttcccaaagagctgcctacccgttcgggctgatagaagattttgtggcattccactcctgcgggcagacgttcggctttgagttcttccaacttgctttctacggcatggcctacttttataatgtccgaaccactggaggcagcgatgagtataccgagagcgcgttcatggtcatagaacatttcattgcgtgtggggttctcgtaggctttctctatacgggcgatgtcactcaggcgaagctggtcgtcatcgtgtccttgaatcagcatttttccgatatcttctacggttttgaatttgtcgtttactgtgacgcggatacggttttcaccattttcataatatcctgtataggtggttttgttctggccgttcaaggttgccagtacttctgcaggtttaacaccgaggtttgccatacggtcttgcaacagggagatattgatgcattcggaacgtttgccgtagagttccacacggtctaccccttccagttcgttcacttcccgttttaccagttcggcatagtcggacagttcacggtcggacagtccgtcacctgtcagggcatagaacatgccatatacatttccgaagtcatctttgactatcggggtggtggctccttcgggcaacagggcgcgggcgtcgcttactttgcggcgcagcatgtcccagcattgttccacgtcatcgtccggcacggtgctcagcagttctatctgtatcagggacaggtcgttgtatgaataactttctatattgtcaatgttgcccatggtgcggatgttcttttcaagcacatccgttacttccagttctacctggtgcgcggaagcacccggataggtggtgactaccatggcaagcttcacttttatttcggggtcttccaatttgctcatctgatagcaggaataggctccgccgagcagcagaaccgctatcaggaaataaatcagattcctgttccggaatgcccatttactgatgtccattataataatcctcctatatttgtgttagtgaccggtgacaaaggttttacaatttctccatcctcaatgtggtgtacgcccgaggatacaatctgctctcccggttgcagttgtctggaagtgatgagactgtgtccgttgttcaacaaacgcagtatggatacttcctgtctgtgtacggtattgctggatggatgaaagacgaacacatacgctttgccttctttttgcaggatggcgccggtagggacagaaagagtattctcctgctctgtacggcaaaggatggttaccatggtgttcatgccgggagaagggatagcccgtgtgccgggtactacttgcaggcgcatggtgtatagttggtttgcgttggctttcggggtgacactgattagtttcagcgggtaggtttcgcccggatagatatcaaatgtgcagtgataattgtcgaactgctcccggcggatatattcggccgcaggcagatttatttccacttcgggggttccgccgctgatcatggcaatgacgggcattccggctccgatggtttcgtgagcttcgaacaggcgtttctggacatacccgttgaaaggagcatagagccgggtgtaagccaactgatctttatggtgtttgtacttggcggtgatttgcttgagcccgtatacggctttgtcattggcgttgggggtggttccgttgtctttgtaaagagccatgaccctttctgcttccgcttttatttgctggtattctgcttcagtagcatccagttgtacttgatagtcggtggggtccagttcggccagtaattgtccctcttgtacacgggcgccgtcttttacatgtattttgctgatggttccgcttacccggaaggcaaggctgatatcttgtgcggcttttacctttcccggaaattgcaggaacgtttgtttgtcggcagaaacaactgtgtctatttttactgtctgatgacctttggcttcctgggcacgttgtgcgcaggaacttagtaagatcaaggaaatacctgttagaataagataaattcgtttcatactactatgattttcgtgcaattagttttctgatacaaagttattccgaagcaagaggatagaaaaggttgatatgaatgataaattgtccgatttgtatatttttgggttgttatgtagctggaaagtttacgatttgtatttattttgcagtaaattaaagaatgtatagattgatggacagacaacagatgccttttctctttagatttctttcggatagtgaactgtatgcctttaaagacggacagattatttcgacatttaataaatgtggccttttcttttgccggaaaggaaatgtggaggtttcactggaagataagcattttcagataaatcccggtgatgtgtatatttacatggcttctaccttggtgcatctgcttcataagagtgaggatgcggaaggggttatggttgaagtggatttagattatatcattcctatcgtcaatagggtgatcaatgtggaaaaccagctttttatgcggaagcatccttgtatatcactttcggataagcaacgtgctcatttggagtatctgttggataatttgcgggagaggatagaggcggaggatgtgcaagaggtgaatttgcagcaacaacgcctgactttggaactgatcaagtcaatggggcagactttctgctatgagatattgaatatgtattttgccaaccaacccatgcagcctttgccgcagaacaagaaggatgtgatttttcagaatttcatgctggctcttttccgtttgtatagaaaggagcgtgatgttgcttattatgcgaggatgcagcatattactccacgttatttttccaccatcattaaagagaagtcgggaaatagtgctttgcaatggattgtgcaaatggtgattaccgaggcaaaacagttgcttgaaggatcggatctgagtatcaaggagattgcagaccaattgaatttccctacgcagtctttctttggaaagtattttaagcaatatgtggggatttcacctaaagaatatagaaaaggcaagttgaggattaaggatggaatttgatttcagaaaatgcaatctattttattttaatatacctttgtgtacaaatcataaacgttttatttatgacccgaaagaacgaacaagagcgattcatgtcttatattacagaacggcaaactcatgagagccggatggcggtagctgattttttgcggaaatatgctgaccggtatcataactctgattttatttcttctgatccggtacagttcccgcatcgctatcatttcaaagcggatattgaaatcagtgcttttctgactgcttttcttagtttcggagcccgccctcaaatactgaaggcggcagaacggctggattccataatgaaccggcagcctttgcagtatgtgttgtccgggaactggaaaattgatttctgtggtgaggagtcgttctatcggacggtttcaaaaaatagaatggcacaattgtttcattggctgtatactatatatgataggtatgagagtatggagaatgctcttctttgcgaaacggatggaactccgatgcaacgtctttgtcgtttgtttggagtgtcggataaggcgccgcaaaagaaattgaatatgtttctgcgctggatgatccgtcgcgattcggaagtggattttggaatctggaggaatttctctccatgtgagttgattatccctttggatacacatgtcagtgagatggctttcagattggagctgacccgaagtaaatcttatacgctgaataatgcaagaactattactgcggctttggctgaggtttttcccgaagatccttgtctgggggattttgctttgtttggctatgggattaatgaattatgagatgtagtttggggtgtgttgctcgaagcaggtagctgtggtgaggatgactatgggatatcatttgcaataaatggaaatctaaaaataatccccgagggatatcacatccatcggggattttcggttttttggttaaaggttagtataaaattaggttaggttgtttcttaaattataggggtacgtattccacgaaggcctccattgcttcataacatgccaaaccaagttggtcatacaaagcagcggtaccccggttgcggtcttcacttctttgccagaacagacgttcgtcgttgcccaggaacggtgcgctttccatctgagactgatgctttaagatggagttacgtttagcacgcaattcttccggactgaacggtacggccatttcaatgttttcaatttcccattccgcccatgcgccacgatacatccagatgcggcaatctttcaaccattcggcaccggcttctttttcgatgtcgatagcggcaagcactgcgtctgtgcagacacgatgggttccgtgcgggtcggcaaggtcaccggccacataaatttggtggggttttacgtcacgtagtaactgtaaaacgatttccacatcggcttcactgatagggttcttctcgatttttcctgtttcatagaacggcaagtcgaggaagtggacacggttcaatggaatttgattgtaagtacttgcagtacgggcctcgccacgacggatcagtcctttaatggtcaggatatcgcggctgtccatatcgccttctttcttggcggcaaggaatttcttgatttcagcgtatttgtttttgatggtttcgttggagttttcatcaaaaagttggttgaaaccgttgatgaagtgcatgaaacgtactacttcttcatcgcctacggcaatgtttccggaagtttcgtatgctacgtgtacttcgtgaccttgctgaaccaaacgccgtaaagttccacccattgagattacgtcatcatccgggtgcggagagaagactaccacgcgtttcgggaatggttttgcccgttcggggcgataggtgtcatctgcattgggcttgccgccgggccatccggtgatggtgtgctgcaagtcattgaatattttgatatttacgttgtaagcagaaccgtagagtgccagcagttcgctcagtccgttttcattgtaatctttgttggtcagtttcagaatcggttttttgacacgcatacacaaccatacaatagcgctgcgaatcaatttgtcgttccattcgcaattggttaccagccacggacgttggatacgggtaaggtgagaagccgctgccagatctatgcagacatttgcattgttatgcatttgcagataagaagcgggcagagtgtcgctcactttgtcttccaccgctttcttgatgatatcggctttgtcatctccccatgccagcaaatagattttgcgggcagccataatagttgccacacccatcgtgatggaacagggagggagattgtccactcccaagttgtgtgcagcttcagcacgcgaggttgagtcaatcaaaatcagtcgggtaggggagctcaagcttgatcccggctcgttcatggcaatattgccttcacgaccaatgcccattaatacgatgtctataccgccaaaagtctggatacgttgttcgtacaggcggcagtattcgatgacagcttcctgcggaatcgttccgtcgatggtgaatacattttgtttatcgatgtcgatttggcttaggaataagtcgttcagctgtgagaaactgcttccagccccttcggaagccaaagggtaatattcatataaattgaaaattactacgttacggaaacttagtccttcatctttatgtttacggactagttcggcataaagcggccgtaatgaagcaccggttccagccccaatcacgcagaactttccttcgcgctgacgttcctgaatttttgccgtaatttcgttggcaatgtgctgcacgccttcctccatcgtttcatagatgtcggtaggcactttttcgcagcgggtcaagacagaacgttccaccgcattttcgggtttataatatttcggagatactctgttcagagaaatctgcgaacttaagtttgttctcataaattacaaattagctttttcgatgtctttgaaatatttgtaggtaccgactttcagttcgtctgtagcggcttcgtcacaaacaatgatgccatgctggtgcatttgtaatgcgctgatagtccacatttgtgtaataccaccttcaacggcatgttgcaaagcacgtgctttgttgtgcccgttgcagataatcagaacttctttggctgaaaggacagtccctacacctactgttaacgcagttttaggtactttgttcacgtcattgtcaaagaaacgtgagtttgcaatgattgtgtctgtagtcagtgttttgatacgtgtgcgtgaagacaaagatgagcccggctcgttgaatgcgatatgtccgtcgggaccgatacctcccataaacaggtcgatgcctccgatttcggctatttgtttttcgtagttggcgcattctgcttccaggtcttcggcatttccgttcaggatatgtacattttctttctttatatcaatatggttaaaaaagtttttccacataaatgtatggtagctttctggatgatcttcaggcaagcctacatattcgtccatattgaaagtaacgacattctggaaagatacttttccctgcttgttcagttctatcagcgctttgtacatgcctagcggtgaagatcctgtgggacaacctaaaacaaaaggtttttcaggagtcggatttgccgcattgattttactagctacatagtttgccgcccattgtgacagcgcttggtaatcagattcaataattactctcatggttctttcttttttaagttttaagtgttaagttaactatacgggttattccatattatccgttttgggacggaggaatgtcaattgtactaccagtgcgataagcacaataatagccaacatggcaaatcccagtcccaacttacctccgtctgtccactttcccaagacttcggtaatggctgctcccgcaaacacgcctgtcatattcatgataccataggcggtagcacggtgtttggatgatacgaactggcatagaatcggcatattgttggcatcgaagataccataaccgattccgaataataatccagctcccacaacagctacgaaactgtgtccgaaccctagtaaaagcagggatggaatagtaagtcccaagccgatggcacccgtgtacacacgtccttttatatttctttgcacccacttatcggataaggttccaccaataattacgccaatgaacgaggatagcgcgatggtgatagtcgacatggggccggcttgtgacatcggtatattcaggttctcggcgaacaaggtaggtaaccagtttttggttgcccatcccggtaaactgggggctgcgaaatatagcagaatcacccagaatgcaatattactgaaaagtaatgataatcccttcaataaattgcttttttctttaccggaaggtgaatttatttgttcaatttgtattctatccttcttttcatgtagaaaaagcatcaaaattacggcgtatgcgatgccggcgatgccgaaccaatgaaaggttgtatgccaggaaaaagcagcggctactgtagcgccgaaacctccgatggcctgcccggtgtagagcccggtcatgtgaataccgatggctaatgaacgtgacttatcggagtgatagtcggcgatcagtgacaatccggcaggaatatagagcgcttcgctgattcccatcaaggcgcgaaggaaaaaaacttcattataggtgtcggcgattcccatcagataagtgacggccgaccatacaaacaaactgccaacaataagccatttgcggttcatgcggtcgcccaccattccggctatagggctcatacagccatatatccaaagaaagactcccatcagtcgcccaaaattggcagctgactgaagctcggtgatatccaccgccatggcatctctcattgtggacaacatttgccggtccatgtaattcaacagggcaacaccccataataatcctactacaacccaaggataaattttactgtttttcatgctaatagataaagggctttataaatgtgattttttgttgtcgagtatttccttgcacaatgtatagcccttgatcatcattcttggaatgtggaacgggcctttgaacaggttacccttggccatttgtgcaggcgtgccgtcacgatggagatatccaaaccattctccacactctttatcagggaaatgggtgtatgtccaatcgctgatttgcttgtgcatgtcaaggtatttttcatttccggttgctaaatatgcatacaaagtagcgatgatagcctctgtctgaggccaccagaatttcatgtcttgggaataatcctgtggcggaaggttcttgcagtctttgaagttgatgatacctccgaattctttgtcccatccccactcccaagaccaatcaaggatagtgagggccaattccgtaatatctttgtcccaattacggtatttggcttcttccagcagaaaccaggcggtctcgatacaatgtcccggattgatggtgcggcccatgttgctgtcgatgaattctccatgggggcctaccgtttcaagcaacgccttgaattcgggatgcatgaaatctttgcgcagttgggcgatggaagcgtcaatctgtccgttgaagctttcatcttgaatggcctgacggatacgtgatgctacattaatcaggatcattgtgatggaatgtcctttcataggaagagtatccagatattttggagggagtatgcctggtgtttccataaaatactgcatccgtttgaacaagtctaatgcttttacggcatacgtctggtcaccggatgcgatggcatattccgacatggcgatggctgcgaatgactccgagaaaatataacggcgtttgcgcaagggagtgccttcggcagtcacttcgaaatacatacgtccgtcagagtcaaaacaatgcgcttctataaagtctattgtacttttagctgccgccagccatgcttcgttcttttctatattattatatgcataggaacagataaaagcaaatcttccttggaaccacactgatttggtggtgtccatcaagctgccgtttcggtcaacgcaggtataaatacctccattgaccttgtccagcccgtatttcagccaaaacggcatgatattggtggtcagatctgttttgtatgattccgaccattcttttatatagtctattgaaaacatcgtggttcaggtttatttgttacatctttcgaagaaattgattgcttccagttcggctttcatggcagcttcttcctcatctgtcatgttctggaacggagtccggttctttcctaaatccagcccgatcagtttcatgatgcgtttaccgccaacgatgtttccacgatagtgacagatgacattgataacttcctgtgcgaaattctggcgttcgcgtgccagttccagatcaccggctttccatgcttcgataatacctgtgagttctttgccgttatagttggttgttccaccgataccgccctgtgcaccgcccatagccagacaaggaaggatcgtttcatcctggccgtgcaacatgtcaaatttgccatttttatataaacggcattggttgtattcatacaggctttcgaaagtatatttgataccggcgaaattaggaatgcgaccgtctacggcttccaagaatgctaccattgagaggaatgctccgttgaaagctgggatatgataaaaatagaaaggaagtgcaggagcgccgcatgctatttcttcgcagtatttcaccaattcttcaatgcgtcctactttggggaaaggaggtgccattgctccgataccccatgctccgattttctgagcgtgttctgctagacgtttgcttgattttacacaagtgcttcctacatggacaatgactttgaatccttcgggtgctacttccatccagcgttcagccagtttcatgcgttcgtcttctgtcagcatatagccttctccggaagaaccattgataaatacgccttgaagtccgtttctaaccaatagttggcaataggcttcaataggttcataatttacttctccgttctcataaaagggagtaaaaggtgcgtcaattaatccgtgaatcttttccatagcctttaatttatttgaaatgaatattttatattacttaatcatgttgcgtgcaaatatataaatgatttatgaaaacaacaagtaaaaactaaatttatttattaataatcactcttttaataaatagaaagataaataagcgacttagaaacgttctttaaatgtatatggaaaatggaattgttacaaaaaatgataattagcttacatcttctaaaataatttttgaaaattctctttaaatgtgatttgatttcataaaaaaataactatatttgtggacattaacggaatattttattatgggtgagaatttgttgaaagaaattgaaaagggctcaaagatggctgtgatgaagaagaaaatcattacccattatatttataatggaagctctacgattactgatttagcaagagagatggatttaagtgtgcctacagttacaaaattcattgatgaaatgtgtgaggaaggttacattaacgactatggaaagctggaaaccagtgggggaagacatcccagtttgtatggtttgaatgcagattccggatattttgtaggtgttgaagtgcgtcagttttccattaacttagggttgataaattttaaaggagatgtagttcagctaaaaatgaatgttccttttaaagcgaagaatacccctgagagtttagacgaattgtgtaagttgattaaacattttcttcaaaaagtcagtgttgagaaagataagatattaaatattaatgtaaatctttccgggcgtgtgaatccggatttgggatatagttacagtatattcaattttgatgagcgcccgttgacggatgtcatatcagaaaaggtgggtggttatcgtgtttctattgataacgacactcgtgctatgatttacggtgagtatatgcaaggtgttgtgaaaggtgagaagaatatcatctttatcaatgtcagttggggattgggtatgggaattatcattgatggaaagatttataaaggaaaatctggtttctctggcgaattcgggcataattttggatatgagaatgagattatctgccattgtgggaaaaaaggatgcatagaaacggaagtttcgggggctgctttgcatcgtattctgttggaacatattaataatggtgaaaactctattatctccaataccaagaaaaatttggaagatttgaccttggatgatatcattgatgcggtaaataaggaagatttgctgtgtattgaactggtggaagaaatcggagtgaaattaggtcgccatgtagcgggacttattaatatatttaatccggagctagtcattattggtggtgcattgtcacgtacaggtgattatttgacacaacccatcactacagctattcgaaaatatacactgaacttgatgaaccgtgattctgttattgtagaatctaaattgaaagaaagagccgggatcatcggtgcttgtatgttgtcgcgcagtaaactgtttgaataatatgtaggtattataaagtaagagatgaattcattacatggttcatctcttatattgccttcttgttaagtttaactctgagcaagctcaataagtttttaaggagctagtattatggttgatagaacacatggtgaaactaaactttgggaatcttttattaaaggagaaacggcggcatttgaagaagtttatcgacgctattattcgttattgtattcctatggaattcgtatggtaggtgacagagagctggttgccgataccatacagaatctgttcgtcaagttgattttaaattgtaggaatttgcattatactgataatgtaaaagcgtatttgctttgttcttttagaaataaactgctggatgcgtttcagtctttacgtcctatggaagtgattgaagaatgccatgagttttttccgatgggcgaagaaataataaattctttatttaagaaagatgatgtggatgtgaagaatgaaagaaggctggctaaggcaatttcacgtctttccggtcgtcagcgtgaaattctgtatttatattatgtaaaagaattgagccatcaggaaatatccgctatcttaggtatgaatcctcaatcaagcaagaatcttttgtcgcgtacattggcacgtttgcgtgaattctttttctctgtttcaaccatatggattttcagtatcttggtgcattgtgttcatgtgcctgtgcgtagtgtttgggcttttcacttctcttgatttagcgagtagttaatcattgttgttttatcatttgggcatgttttcatggaatgaagtgatatttgtgtgatgaataagttcttttatttgtcatataaggtttgtctattggttttgcgaaggctcatgcaaagaaaagtgtgatttcttttcttttttatgagtaccttttttatcgggcaccgttttcttaataaaaaggtttttcgatgaaaaataaaaaaacaatatataattcagatgaatttcgtaaaacagttcaatgcctgactgagaagattcgggaagcagatgaactggaatctgttgatgtagacaaatcttttcaggacgtgatgaaacgagtaggaagggaaaaaaaggttccccacagacgtcatatttataggtggtctttgtcgatagcggcagcgattgctttggctttagttatgaactggtggagtaccaatgttgatgagggtacggagcttgatatagcattgctgaatgacacgacttccatttgcggtgatgaggtgattctgataacagataaccaagctatgaatctgaaaaatgatgcttctttaaaatatgatactttaggaagttcgaatattcagcagtatgcattaaatactaaaatatcccaggcttcatctgtaaagaatgaaatgcatcaaataatggttcctaatgggaaaagagctgatattactttttctgatggtactagaatttatataaattcaggtagtaaagtgatatatccggatatttttgaagaacggaaacgtgaaatcttggtagagggggaggtttatctggatgtagccaaaaggaaggattgcccatttgttgtcaaaacaagagagtttgatatacgcgtgctgggtacttcgtttaatgtctgtgcctatagggaggatgaggctgcatctgttgttttagtacgtggaagcgtggaagtaactactgagaataagagcaaagtaagattagcacctaatcaattggtggatattaaaggcaataaaacgcaggtacgtaaggttgatgtgtccgaatacatcagttggaaggataatttattgctgcttcatcaaagacccgtaggagatgttttaaagaagcttgagcggtattatgggtgtaaaatacggtatgatgcagagattacgaccttgtcattgtcaggaaaactggatcttcaaacagatattaccaatgttatggataacttatgtctttcattatcattgcattatacaataaatgataaagatgaaatctatgtgagccttaaatgagaattgttgaaccttaaaatactttagcctatggaataaaagaaggatgtaaaaaaagaaaaccagacagtatttgccgtactatctggtcactgaatcgttgtttaattatttaccttgaaataaatagaaaaaacaatcaaatatatgaaaaaatacacgaatagaataaaactcatgcctaaattcacaaaatgtatgagtttagccatgattttaacatttacaggttatgaagaggcttttgcggaaatgagttatgcggaacaaaccagctttaccgtttccatggagaaccagactttgaagagtgtgattaattgggtagaaaagaatagtcaatttatttttatatatcgtacagatattgatttgtctcgtcgtgtcaatgtggatgtacgaaataaaacaatagaggaggtactgaaacaaatgtttgccggtactgatttggaatatcatatccgtgacagacaagtaataattcgcaaggccatttctagagaagaaacgcgtcccattgttatgcaacaagataaagtgactgtcaaaggtatagtgaccgatgccaaaggagaagcaattattggggctaatattatagagaaaggtactaccaatggtaccataactgatatagacggccggtttacgttagtggtaagtgaaaaaacgtctttggtcttttcttatatcggttatctgactcaagaaatgttggtagggaaaaaaacgtttctgaatgttcagctgcaggaagacaataagactttggatgaagtggtgataacaggttatgggggcacacaacttcgttctaagatgactaattccattgctaaagttgacaattctactttaagtacgggggcccatactaatccggcgcaagcactctctggtgcagtggcaggattaagggtacagcaaactagcggtaatccgaattccactcctactttggtgcttcgtggtggtaccaatctggatggtagaggttcacctttggttattatcgatggtgctgtacgcgagtcgttgagtgatgtgaatccggaggatatcgagtctttggaggtcatgaaagatgctggtgctacggctatttatggtgcgcgtgcttccaatggtgtaattcttgttactactaaaagaggttcggaaggacatacggaaataaatttgagtgcgaaagtcggtttcaatttttttcatagccagtatgaatttttgaatgctcatgattatttgtattatatgcgttcggcattttatcggtcttcgcatatatggcaggataaatcgggtgcttggcatggatttgccagtgatgcgactttatccggaacacagccttacggaacgggaaacagatattttgatgaaaaagggaatgtacttaatggtaataaggataatacagccgtatggggtgttatgaattatacagatgacctggctttcctgttaaaacaaggttggcagacaatggatgacccggtgaatccgggacaaaaattgatttattgtgataatcaactgaaagattataatatcaaatctccggctattactcaggattataacttgagcgtatccggtggcaatgataaaggacattattatgcaagcctaggctataatcgcagcgaaggaaatgcgatgaacaactggtatcaccgtttgaacttcacgatcaatgcagattataaaattaagccttggcttacttctaattcttctttgacatttaccgatgcaaaatgggacgatggtggtgcaggatatgccggtgaaggtaattttttcagtactaccttgtccgttcctcctacattccgtgtgaaaagtccggacggtgattggttggcaggccctgccgtggcttcttatgctcgtggctggactacagtgaaagtgtatgaggatgcattgaattatgataataatacggacaagtttaatctgagccagtcttttacctttaatataatgaaaggattgacattcaagaccacaggaacttggttctattttgatgatagcagagagttcttcaaaggggactatattgtagctacaggaccggtgtatgatactaatcatagtacttccaacaaacatgaacggcttttagaccagacttacaatggaatcttgaattatcagactacattccggcaagatcattctatggatgcgatggtaggtgtagaatattatgactcatacaagaaaggtttttcggcatctggttatggatctccattatctgattttcaggatttgaattatacttcgactgctgccggagtgcggcaaatagattcttggcattacagacagcgtattctttcattctttggcagagtgaattatgattataagtccaaatatttgctgagccttgttttacgtcgcgacggatactccaaactgccaaaagataaccgttggggaacctttcccggtatatcagccggttgggtattgagtagagagaattttatggagtcttgtagcaatgtactttcttatgctaaaattcgtgctagttacggagccaatggaaatgtgtctggtgtactggatgctaatggtaatgtagtgacaggacttgattattatacggttcaaggttcttatggtattatgaaagataaagatggtaaaatagtacccaactataatggcaaagttcctttgatgataaacgatttgcctaatcccaccatgagatgggaaaaatcgtacacattcgagacaggtttcgatattggttttctgaataacaaatatatcttgaacttcacctattataatagacatacacaggataaatttgcagaaatcaccctgccttctcatagcggagtttcttctttcctttctaacaatggagaagtacaaaaccaaggtatggagttggaattgactgccaatgttttgcgtaccaaagattggaaatttacagttagtatgaataccgcttataataagaataagattatctcattaccgtacaatggattgccgaataatatgcaggatgcctatcaggtttatacgggacgcaagctggcagatggtacctatgaaagacaatgggtaggtggttatcaggaaggacaggaatatggtgtgatttacgcctttaaatctcttggtatttataagagtgagagtgagattccaggcaatctgatagacagatccacttatacggaaaatggagcagatgccaaagtgctttatggccctgaagcttgggctaaattgtcggatgccgaaaaggagaaaggactgcctatacaggctggtgatgtgaaatggcaggatgtgaatggggatggtgtgattgatgattatgaccgggtgaaattgggtaatacgatacctcattggaccggaggctttaacattaatacttcatggaaagggttaactttgaactgccgtttggattatgctttaggctattgggtacatgattggaaaactccttggattatgggtaatatgcagggaacatttaataccatttctttagttaaagattcctggtcggaaagtaatccgaatggaaaatatccggtgtatggatgggctgactttttgggcaaacgtaattatgacagaatatcggacattaattgttatcgtggcgattatttggcttttcgtgaaataagcctgtcgtattccttgcctcagagttggattcataaatccggtttgagcaaggtggatgtttctgtaacagcacagaatttgggatatattacagcagccaaaaatatggcgacccccgaatatggtgtcagtcagaatggaggatatcccctccctagaacagttgttttgggtttaaatgttacattctaataaataggaaggattatgaagaaaatattttatagcatattgttgagtgggatgatggtattgtctgcttgtgatgcgttggacctgtctcctgaagattattatggctctaatgatttttggaatcagaagtctcaggtagaaatgtttatgactggtattcatgccgatttaagagataaatatcagatgcctgtcacattgggagagttcagaagtgagattctgataagtgatgttacttctatgggtgagggggtatatggtccgcctatgactaataatctgcttacgaaagataataccggtatcgatgattggtatgaggtgtacccaaatatcatgcatataaatttgtttatcagaaatgtagataaagaaattgattatctgactggaacggagaaatcattttatttgggacaggcttatggcttgcgtgcatattactatttctatctttatcgaacatttggtggtgtgccgttagagacggaaccgaaagttaccgagggtagcattgatattacgcaattatataaggctcgttctactccggaggaaacgttggagtttatcaaagaagatattaataaatccgaagctttcttcaatgagtcggataagaagatgtccaaccaatatgaatggtcttatcatgcaacggaacttttgaaggccaagatatatatgtggtctgccaaagtcactacaggattaccagatgatgatattgcaggagatcatatagctactctgactgccgtagatcctaataacagtgacttgttgacagcaaagaaggctttattgaatttggtgaaccaacaattcgaactgcttccaaactttgcggatttatggactccggaagggaagaagaataaagagatcattttcgctctgtgttttaataagaatgaattgaccaattggggggcgaactggttctataatgtagccttgtttaccaatgctacggacttggatggaaataaatatggtccggatccgttgaagctattgacagccggaccattacgttatgagtataaagtgccgtttattgagatttatgataaggaagatactcgtttggatgctactttctttcaatatatgttcgaaggaaagactcgtggcgcttgttggaaaaaactgatgggacatacggatggaggaactcattattatgattcagatgtaccggtatatagatatgctgatgttttgttgatgctggccgagtgtgaaaacgggttgggagctccggataaatgtgctgcatatataaatgaggtacgtaagcgtgcttatggtgataaatttgaacaacataaatatattgcaggagattatgcggataatgagtgggctattttgcaggaacgtgataaagagtttgtaggtgagggaagccgctggtttgatttattgcgtttacgtgattccaacggaaaaccttttgtcttttctgttaaagcgcattatggaagttcattgcctatattaacagaggataaggcgtatatgatgttgtggcctgttaatgtggaagttttgaatggagatccggaaatcaagcagactccggggtatgaataatagtgagataatatgatgataatgaaaagattgctctttttagtatctgtatgcagcttatgtatggttggtaattctcagaattaccaacctgagaagcatgcagttgtgaaatcagatcgtggggatggacggttactaagtacttatgccattgttcatgagatgttgaaagatacacatccccaatatgcttaccgttccggtatgtccgcacaggaatttacgcaatggcaggatggagtgcgtgctgcgatggtggagatcatgaagtttcccgagataaagagacaaccgtctcctgtctgtgtgaaaacggaaaaaaaagagggatatattttagagaaatgggagttctatccttttccaaagtcagtttccacttttctggttttgaaaccggaacatttgaagggtgcagtacccggagttttgtgcattccggggtccggaaggaccaaagaaggattggttggtgagcccggcatctgtgataagttaactgaggattataataatcccaaagtaagtatggctttgaatatggttaaagaaggttatgtggcggtagcggtggataatgccgctgctggagaagcctccgatttggaatgttatgataaaggatggaattatgactatgatgttgtttcccgttttttgcttgaactgggatggagttggctagggtatacttcttatctggatatgcaggtgctgaattggatgaaagcccagtcttatatccgaaaggacaggattgtgattagcggattctcattaggtacagaaccgatgatggtcttgggggtgttggataaggatatttatgcttttgtgtacaatgattttctatgccagactcaggaacgtgccgttgtaatgactaaacctgacaaggaaaacagacgtccttttccaaattctatccgtcatctgatacctggttattggaggtattttaattttccagatgttgttgcgtcattagctcctcgtcctatcatttttacagagggagggttggaccgtgatttccgtttggtacaatctgcttatgctgctagtggaaaaccggaaaatgcggagtttcatcattatccgaagtttgctgataaggcagttagaaaagatgtggagcaccttgatgaaggactggattcaaagacctatttcgaagcggtcaatgtagatcccccttctcattattttaaaaacgaactggttattccttggttacgcaaagttttaaagtaggttcaggtattttgataggctgtgattttttatataatatgagctccttgtttttcatctaggtgaaagcaaggagctcttttttattgattgtgaagaattcttgcaaaatttaatcttgttttaatgcagattgtagtgtttcccaatttttattgaaatcgggcatggaatgaaaaagtaaattcgctccttcattcagtaacacattgtcgtgcaatggtcctgtattcacggcgatggtaaaaataccggctgcaactcccgcctgtacacctagtggtgcattttctattactaacgcttcattgggtttaaagccgcctttctttagggccatcagatatggttccggatttggtttcccatatttcacatcaaaggcggtaaccattaagttggcttggaatatgcccggaaaattatgattcaatcggtccaataacgaagtttgtcccgaaccggttactaccatcggagtcagtccttcactctttattttagtcaatacttccagtgcgccgggcatccgttctgctttggggcatttgttgaattcttcagttttggcttggtagatagcttttatttcttcttcagtagcatcatgcccacgttcccgacgacttactatattgatcgtagatgcaccggtacgcccttcgtgcatataagcttcttctcggctgaggccgaaaccgaagcgtttcattattttatgccatgactcagcatggttgggcatggagtcgaacagcacgccgtccatatcgaataatacggctttcaagtcgatggattcgtatccatgagtatgaagatagttatttatcgcttctttaaacatagaataaatgtatagttattatttccaaaggtgtgaccgttggattggaacaaagtgaagaatctgcaagcatttgatggatgctttcagattcttcactgttattcggaatgacattgataaatggcattctgaataggtttttgatattataatctagcttggatagctttagactcttcttcgtatcccggtttattcaacaaagcaaacatatttttcttgtatgcttccacgcccggttggttgaacggatttactcccagcaaataaccgctgataccacaagctttttcaaagaaatagatgatttctcccaggtagtattcattcagttcgggtacaatcagtcgcatattgggtacaccaccgtcaacgtgtgccagctgagtacctagttctgccatcttgttcacttcgtctacacgctttcctgccaagaaattcaagccatccaaattttcgctgtccgaaggaacttgaagcgtatgttccgggttttcgatagagataactgtttcgaagatagtacgttcaccttcctgaatccactgtcccatagaatggagatcggtagagaagtcgacggcagacggataaatacctttaccatccttaccttcggattcaccgtacaattgtttccaccattcgttcatatagtgcagcttgggattgaagtttaccaaaatctcaatcttctttccgtctttatacaattcattgcgggtggcagcataaacagctgcaggattttcggcaaacggagtagccggaccacatattgtttccatcgtgcgtgcgccttccactagtttctcaatgtcaaatcctgccactgcgataggcagcaaacctactggagtaaggacagagaaacgaccgcctacattatcggggataatgaaagtctgatatccttccttgtcggctgtaacacgtgcggcaccctttttggcatctgtaacggcaacaatcactttcttcgccatttccttgccaagctggtcttcacactgttttttcagtaaacggaaagctaaggcggtttctgtagtagtaccagacttggaaatattaattacaccgaactttttgtccttcaagtatgcagtcaactcgaacaagtaatcttcgctgatattgtggcctgcaaaaacgatgacgggtccgtcttgttttgctttcaaccattggaaactattggataaagcttctattacggcacgtgctcccagatagcttccaccgatacctgctacgactactacttcacagttgtcgcgcagaacctgggcagtagctttcaagtcagccaaatgttcggctgttatagacgatggcaaatgcaaccaacccaagaagtcattacctttacctgtaccgttttccaatgtttccatgcaggctttcacctgaggttcgtaagcagcgattgtttccttagaaacaaaaccggctactttgtcgatgtttaaactaatattcttcattgtatctgatattttatctgaatgaatcagttaataatttaatctcaatcatgggcgagatgcgctcatataaaatattataaacggcatctacgataggcatgttcacgtgcaagtgcttgtttagctccttgatacatttcgttccgtagtatccttcggcaatcatttccatttctatctgtgcgctttttacggaataacctttaccaatcatggttccgaatacgcggttccggctgaaattggagtaggaggtaaccaacaagtcacccagataagcggaatcatcaatagaacgctctacgggatgtacggtattcaggaagcggttcatctcttgaatggcatttgaaatcaatacagcctgaaaattgtcgccatatttcagaccgctgcaaattccagcggcgatagcataaatattcttcaataccgaagcgtattctatacctgccacatccgggcttacagaagtttttatgtaatgtccggccagctgccgagcgaatatcttcgccttgtcaatgtctttacatccgatagtcagataggaaagacgctccaaggctacttcttctgcgtggcacggacctgcaatgacggctatattctcttcgggaacaccgtatacctgatgaaaataatcggaaacaatcaggttctcgtcagggacgatacccttgatagcagtgacaatgaacttgtcctttattttggttttcagctttttcaggtggcttttcagatagggagagggggtaacgaatatcagggtatccgattcctttactatcttgttgatatctgaagagaagttgatgttctttatttcaaagcgcacacttgtcagataagccggattatgtcccaaacgtttgaattcttcaattcggtcgtcgcggcgcatataccagttgattgattcagcctgagccaagactatttttgcaatagccgtggcccagctgccaccacccattatcgctattttaccgggcaatttcatgcttattatttatgatggataattgacaattggaataattctcaatctttaaattctcaattctcaattttcgcaatccatccggcaacttcgtccaccgtaggattggttagttccaatttatattttttgttgattccgcaaatgtccatatgcagcttctgcggattcacttctttcatatcgctcaccaggttatagcctgctttctgaatgacaggaacccagtcttctgaaattcccagttccataaatttggcaggagtgtctttcggagtaatcttttcgggacgcatctgggggaagaacaatacttcctgaatggtagactgtccggtcatcagcatcgtcagacggtccataccgattcccatacccgaagtggggggcataccgtattccagcgcacggacgaagtctttgtcaataatcatagcttcatcatctcctttttcgctcagtttcatttgttcttcgaaacgttccaactggtcaatcgggtcgttcaattcggagtatgcattacacagttccttgccgttcaccatcagctcgaaacgctcggtcaaatccggattgctgcggtgtatctttgtcagcggagacatttctttcggatagtcggtgatgaaagtcggctggatgtaagtaccttcgcagaattctccgaagatttcatcgatcagtttgcctttgcccattgtgtcgtcaatctccatattgagtttctggcaaacttctcgtatctgttcttcgttcatgcctgtcagatcatagccggtgtgttccttgatagagtccagcatggtgacacgtttgtacggggctttgaagtcaatgatgttgtcgcctacttttacttgagtggtgccgtttacatccagacagattttttcaatcattttttctgtaaattccatcatccagttatagtccttgtaggcaacatatatttccatgcaggtaaattcagggttgtgtgtgcggtccattccttcgttacggaagttcttacctatttcatacactccttcgaaaccacctacaattagtcttttcaggtacaactcactggcaatacgcatgtacagcggcatatccagtgcgttgtggtgagttatgaatggacgtgcggctgctccgccggcaatggattgcagaatcggggtttccacttccatataaccttttgagttgaaatattcgcgcatagagctatatactttactgcgcttgatgaagatatcttttatctcttcattcacagcaaggtcaacataacgttggcgataacgcagttcagggtcttcaaacttgtcgtaagcgactccgtctttgtattttacaataggaagcggtttgatagacttggacagtacggtcagttttttagcgtggatactgatttcacccatttgggttctgaatacgaatccttctataccgataaagtcaccaaggtccagcagacgtttgaacacagtgttgtacatttctttgttttcatccgggcagatgtcatcacgggtgatatacacctggatacggccttttgaatcctgtaattcgataaatgaagctttacccatcacacggcggctcatcatacgtccggctaccgatactttgcgaggttcctcatcatccttgaactcagcttttatatctgtagaaaatgcattggttacatactcagctgcggggtatggctcgatgcccatagcgcgcaattcattcagactgtttcgtctgataatctcctgttcacttagttctaatacgttcatcctgttaaaacattaactcaatttgttggcaaaaatacgaaagattttgcaaagtacctcattaagacgtgtttttatttcgataaagcctgttcttgagccagttcgcacaccatagatatcatgaacagcactccgattgcaccgcaggcaataatcagggcgagattaatcatacgggcacggaaaagggtggaagtatgcagatgggaagctgtgtattctttaaagaacagataaaggcccggtacagccgaacttgccagcagaaaatcttcgggaatatggaaaaagtaagttttggtgaaaccgatcagtgcccagtggcagagaaacatgacgagaaagatattgactcgtttggaaaatgccagcagcagtccgatggtgaaaaccgctaccgaacaaggcattacaggtgaggtcatcatgggaaagttcatcccccttataatggagaagagtggataggccaatggcaacatacaaagcaggacggctagtgcggtatgtttgtgagtccggtcaaaaggggtgtagtttactttcaggtcataaatccagaagatggccatgattccccaaaatcctgccaaagcactgttataacttcttggttcacaataaatcatgtaatacacggaagctatccatacattcaagaatataagatataacttcatcgctacttttattttttttgtggggcttttgaatagagaacaggttaaaataatgccgataagggtgataataacttgataaatccaggtacccgcattgtaatgagtaattgtatcccaaaaaatattcatcttcttgataagttggtagttattttgggtgccaaaattacgaaaaaatgatggaatagcctatctttgtagcgaatatataaaaataagagaagaacgatgaagaagtttatgagtctgatgttgctggtttgcgcatgtttgctgagtcagccggtgaaggcacaacaggttactcctgataatgccggttatatagtaaaggtaggggatatggctcccgattttgaaatggaactgacagacggacagaaagtgaaactctctgatttgcgtggcaaggtggtgatgcttcagttcactgccagttggtgtggagtttgccgaaaggagatgccttttattgaaaaagatatctggttgaaacataaggataataaagcgtttgctctctttggagtggatcgggacgaacctttggaaaccgtagtggcttttgccaaacgtaccggcgtgacctatccgttggctcttgatccgggagctgatatttttgccagatatgcagaccgtaaagcgggcatcacccgtaatgtattgattgacaaaacgggcaagattgtaatgctgacccgtttgtacaatgaagaagaattctcttctttgtgcaagaagatagatgaaatgttgggagaaaaataacaggtaatgagaggatcggtactatttgtcacgtttttattttttgttctatcaccgcttctggcgaagaaaaagcctcgtaccggcaaagaggcattatttggaaaggaatatgctacctatcagattacatccaatgaactaagcggagcttgtttttatttggtgagtggtcacggaggtcccgatcctggggccatcggtatctatcaggggcgtcagttgcatgaggatgagtatgcatacgatattattctgcggttggcacgtgagttgttgtcacgaggtgcgaaggtgcatattatcattcaagataagaaagatggtattcgtgacggtcatgtcctggcaaacagtaaacgtgaaacttgcatgggagatcctattcccttgaatcaggtggctcgtttgaagcaacgttgtgactgggtgaataaactgtatcggaaagataagagcagttacaaacgagctgtatttattcatgtggacagtcgcagtaagggacagcagacagatgtgtttttttataacgctcctaaaagtacgaagggtaggcggttggccaataacttgcaccgtacctttgataggaaatatgacaagcatcagccaaaccgtggctttcgcggaacggtgagtgaacgtaatttgtatgtattgcgtaatacgactcccgtagcggtgtttttggaattgggaaatattcggaacaagcgtgaccaacaacggctggttctgaagaataaccgtcaggcattggcaaattggattgcggagggaatagtgaaagactataagcaaggtaaataaaataggggcaacggatgtgcttttgttttgccagctttgtgatggttgggtgagttgtaatcggcagaatgtgactggtatttgagcttgtgaaacgtcgaaatcaagccttgcatattagagtagtgaaataaagaaagggagtgacattttttatcactcccttttcttttacttgatttcgatttcctctttcatgtctatttcctcaccgtgaacatcggtgaaccgatattgcaggaaggccagactttggtctgggataatctttattccgaatccgtatttcatttgccatttgcgcttcagggaaaccagaccctgattcacatatgctgcgatgtacggatggatgtacagcgtaaatctctttatcttcaatttgttgaccaggtagtcaatcttactctccaaagtatccgtaaaaaggatggatggctttatgctacctttcccgaagcaggtgggacaggtttcattcgtgttgacatccatggcaggacgcacgcgttggcgggtaatttgcatcaatccaaatttactgaggggcagaatgttatgttttgctctgtctttctgcatgttttggcacatacgttcgtacagtttctgccggttctctgctagattcatatcaatgaagtcaaccacgataataccacccatatcacgcaatcttaactggcgtgccagttcgtcggcggcacccaggtttacatccagtgcgttagcctcctgcccgttggcagatttggagcggtttccactattgacatccactacatgaagtgcttctgtgtgttcaataatcaggtaagctccacttttatacgaaatggttttcccgaaagaggatttgatttgtttggtaataccgaaattgtcgaatatgggaagctgacccttgtacagttttacgatttcggctcgttcaggggcgataagtgatacataatccttaatctcatggaacactgtttcatcgttcacatagatgttctcataagacggattgaaaagatcgcgcaacatggccactgtgcggctggtctcttcgtataccaatgccggcagtttgggagccttctgtactttagtgattgtttcttcccaatgtttcagcaagactttaagctctgcatcaagctcggccacccttttgccttccgctacggtgcgtacaatcactccgaagtttttcggtttgatgctttgcaataactgtttcagacgggcgcgttcttcgctcgatttaattttttgtgataccgaaaccttatcgttgaaagggattaataccaaataacgtccggcgaatgacaattcgcaggttagtctggggcccttggtcgagataggttcctttacaatctgcacaataacttcctgaccttgttggagggtggttgaaaccgtcccttccttttcaatatcaggcagcatagtagcttttgtgatgggaaaaagttttttacggtcgcttaaaacttgcttcagatacttctgataagaatgaaattgaggacctaggtctagataatgaagaaaagcatctttttcaaagccgacatccacgaaacaggcattaaggccgggcattagtttctttacccgtcccaaatacatatttcccacattgaaggaagcacttctcccttctttctgaaattccaccaacgctttatcttcaaggagtgcgatggaaatctctttgggttgtacgtctactactagttcgcttgtcacttttgtatttttaaattgttcacttttctcattaaacaaagaacaaacctgaaagacttttgttgctttgcaaggtttgttctttatttgtcgtcacagacagactacaaattattttttgcttttatgtctgttctttcttagtctttttttacgcttgtgagtagacattttgtgtctttttttcttctttccgcttggcatagcttcaaattttatgggttaatactcttgtttattatttctttactgataatgtaaatgtcttagctggtttaaatgccggaatattgtgctccggaataatgattgtagtgttctttgaaatgttgcgagcagtcttctgagctcttttcttcactacaaaacttccaaaaccacgcaggtacacattttcttctttagataatgaatcctttactgtatccatgaaagcctcaagtgtggttaacactgtcaccttgtcaataccggtatttttcgtaatttcgtttacgatatctgctttagtcatttcgctaaataattattgttatacttatatcttaattttttggactgcaaatatatagcttttctccctctttaagaaatatattcagaataaatttcctaaaaaaagcatcttcttccattttcttggtttacttttgcggaaatattgcatagaatgcacttttatataatactgatatggagaattttagcagaaaattgatagattggtatagggaaaacgggcgtgatttgccgtggagaaggacaaaaaatccttatttgatatggatctcggagattattctacaacaaactcgtgtggttcagggatatgattactatcaacgttttgtggcccgttttcctgatgtgttcgcactggcggcagccgatgaggatgaggtgatgaaatattggcaggggctggggtattattcccgtgcgagaaatttgcatgctgcggccagaaggatggcagaggcaggaggatttcctgtaacatacactggggtgcgtgctttgaaaggagtgggagaatatacagcagcggctatttgttcatttgcttacggtatgccatacgcagtggtggacggtaatgtgtatcgggtgctgtcccgttggttaggcattgatacccccattgattcggcggaaggaaagaaactgtttgtccgggttgccgatgagttgctggaccgtgagcgccctggtctctacaaccaggctatcatggattttggagctttgcagtgtactccggtagcgcccgactgcctgttttgtccgctaaacgattcttgtgtggcgcgtctgaaggggattgccggctctttgcctgtgaagcaacataaaaacaaggtgactaatcgttattttaattatatatatgtacgcatgggcgcgtatacctttatacataagcgcagcggaaatgatatatggaaaaatttgtatgaaccgcctttgatagaaacggatcgtgagtggacggaagaggaactgtatgcatcgccacagtttcgcgagatgctggccggaggagaggagcccatagtacggctggtgcggaaaggggtgaagcacgtgttatcccaccgggtgatttacgcaaatttttatgaagtgattctccctgagaattcggcttcttttgcgaagtatcagagaataagcgtggaagatttgcataaatttgccgtatcgcgtttggtgaatcagtttttttcgctaattttggagcctaataattaaaaaggaataatagaatgtcagtaaataaagtcattttgattggaaatgtaggaaaggaccctgatgtgagatatttggataccggcattgccgttgccactttctcgttggccaccaccgatcgtgcctatacgttgcagaatggaacacaggttcccgaacgtacggaatggcataatatcgtgttatggagaggactggcccaaactgcggaaaaatatgtccgtaagggcgacaaactctacatagaagggaaaatccgcagccgttcatacgatgaccagaatggcataaaacgtaccattgtcgagatttttgctgataatatggagatgctgaccccgcgtaacacctcgcagcaaccgggtacaggatatgtaccgcaggcacaagcggtatcccggcagcaggtgtctgcacaagcggctctgcaacaacagcaagcctcggataatagtctgacggacgatttacctttttaattaagagaacttgatgtttaactaaaaccagattccttggaccctgactcgtatttatgccgcttggcggatttatttgacggtgtaaccgtaacagctcctaccatgggagctatcatagctatcttgttagctgttttattgttgtatgcctcaggctttgtgtctgcttcggaaatagctttcttttccctttcacctgttgatttaagtgagatagaggaaggaaaacatacttcggacaggcgtatcagcgccctgctgaatgattccgaacgcttgttagcgactattcttatctctaataattttgtcaatgtaaccattatcatgctgtgcaattacttttttgccagcaccatacactttggaaattccgtgattctggaattcctgctaataacggttgtccttacttttctgctgttgcttttcggtgaaatcatgcctaaaatttattcggcacagaacacgttgaagttttgccgtaaggcagctcctgccatttcttttttaaagaaattcttttcacctttgtcggcattgctggtccgttcttcctttttggtgaacagatgtgtggcaaaaaagaattataatatttctgtcgacgaactttcacaggctttggaactgacggacaagagtgagatttcagaggaaagcaatattttggaaggtattatccgttttggtgaggaaacggctaaggaagtgatgacttcccggctggatatggtggacttggaaatcaatactccttattccgatgtgttgaaatgtattgtggaaaatgcctattcccgtattccggtatatgccgaatcgcgggataatataaaggggattctttatataaaggatttgcttcctcatttgggcaagggcgacaactttcgttggcagacattggtccgtcctgcttactttgtacctgaaacgaagatgattgatgaccttttgcgtgattttcaggcgaacaagatccatattgccatcgttgtcgatgagtttggaggtacttcgggcattgttacaatggaggatatcatcgaggagattgtaggagagattaatgatgaatacgatgatgaagagcgtacgtatgtgaaactgaatgaccgtacctatatattcgaggcaaaaaccttgctgtccgatttttataagattatgaaagctgatcccgctcttttcgagaaagtggaaggagatgcggacactttggccggtttgttgctggaaataaaaggggagtttcctgtattgcacgagcggttagattatgggaattatcattttgaggtacttgaaatgaatacgcgccgcattttgaaagtaaaagttatcgttgactcttccagctccgtggaagaagaaaagaaatagattttattatgcctttataccgtacttatatcgaaggggagtttctgcttggaatatggaagtctgatgaaacaacggaacaactgctggcatcattggagcataaagactggtatagggagaaattggctgttctttccgaaaaacggaagcatgaatggttgtcggtacgtgtgctgctgaaggctttgtgtggagaagaaaaggagatagcttattactcttcgggaaggccttatctaaaggatggaagccggtatatcagcatctcgcatactcgcggttatgtggcggtggcgcttcattcttcctgtgaggtgggaatggatatagagcagtatggaaccagagtgcggaaagtagcttcccgttttattcgttccgatgaagaacccgcaatgatggaaggagatgaagtttatgctttattgctccattggtcggccaaggaggcactgttcaaactgatgggagtagaggaggtggatttcattcgtcatcttcgtatttttcctttcagcttgtcggaagagggggagttcgaggcatgcgaatatcgtacaggccggcaggaacgttatcgggtccgttatgtcactcatcccgattttgtattgacttggattataaaataatgctcaggcgaatcacttcggctgagcactccaaataaacttggcagagtttactttaaaataaattttctttttacctgatattcttttccggacagtgaaacggagaaaatagcggatgtgtttaaaggcatcccttacgttcagtgttccaagctctttcctcgaaagcttcagatttgataaatgcacaggcaggtcttctgactcgtttccgctataagcaccttcccggaaattatcccagtggttattggcattttgcttatgcgtttagtgaaacatacagcagcgggactgttcaggattctcaccttgattcccttttaatcattcacctcggaggggagataaatgaaccgatgcactgcaaagatacagtttatatttaagaaaacaattatctttctttattttttggagcctgtttaaattttgaagaaaatttagaaacaggctcttgtatcctcttattctttactcaatgtaaatatgaattccagacctccaccgggggtatttttagcgaagattgttccgccatgcagaatgactgcgttttttacaatagctagtcccagtccggtaccgcccaatttgcgtgaacgtcctttgtccacccgatagaaacgctcgaacaaacggcttagatgttcgggtcctactcctacgcctgtgtccgagaaactgaaataataaaaacgttcgtcttcacggaaacagcggatggttatggaaatatgagttcctgcgtatgcaatggcgttgtctgtcagattccggaagatggagtatagcagggaagaattgccttgtatggtcagtccttcaggcagcatattgtgggctgtgatctgcttttcttccagttccaaagttacttcgttcaggatattccgcatcatggtggtgaggtttaccggttctgtttcgatcatgttcggagcttcttccatgcgggtaagtacggagatatcccgtaacagatgtgccagccggttactttgtgcatagcttctctccaggaaagcattgattttctcacggggcagggtaggattgtttactatggtttccagatatccctgtatgctgcttacaggggttttcaattcgtgggcgatattctgtgtcagctgttttttcagaagtgcctgttccttttcctgagtgatgtcattgatggagatttcaaagctgtcatcttgaaagataatgcattccacggcaaagatacgtccgtttttgtctatgttcaatgacatccgtttctcttctttgccgatactgcgttccttgttttttgtaatgaaacgggtgatgggctgcaattcggggatggagaagatctcttccgtagaactcagatttttgtccgagataaggttggcgtattgtgtgaacagattatttaccagaatctcttctttgcggtggttgaatacgcctaagccttcgtgcgagatctggagatgggtgatcagtttctcgcgttcgatatataaatcttcttttgcctgatgcagacgtttgtaaatctggatgatatgttgggatatttcgcccagttcgtttttgggaaaggtatcctgcatatcagtgtctatcggttcattgcggtcggctttcatggcgaattgttgcaatttggtgatagacattcccaatttatgtgtgaatcggtagaacacaattattaatatcaggctgattatcagtgtgaaccatacataatgagagtctgctttcaggtgtctcatcagactgacattatagggaagggctgaacgaatgatatagtccagattaggataatactttgccgaatagaaaaattcaccgcccaggctttccgattgtctgttaatggagtagccgctgccataaatgatggcttcttttatttcctgacggttatggtggttctcgaagtggctgggatctttttccagattgtcataaattacagtaccattcttgttgatcagtgtcacgcgtagatcttcaaaggtgtgttcgcaaacatagtcgttcaattgttgaatattcagtgtatccctgccacggagaaaatcattcaggcggtcgttgtaattctggagttgtgtgttcagcaattctattttgtattccttctccctgcgatattggaatgccatgaaacagatggcgaatgctatgaataaggaaattaccgacaagaatagtttcttgttgaatgacaggacgtggctggataatttaatagtcatggaaaggtacaggttaggttattcgcattcaaaacagtatccgtatcccaggcgggtgacgatgcattttccatattcgcctatttttttacgcaagcgggtaatgttgacgtcaatggtacggtccagcacatagacttcctcctgccatactttagccagaatatcttcgcgtgagaatacgcggcctttgttttgtaacaacagcaacaggatttcgaattctttttttgtcagggaaatttctataccgtctatgctgactttcttcttggttatgtcgactaaaagccctttgtactgtaattgttcttgcgcttcttttccctgtgtaggactggtgcgtcgaaggacagccttaacgcgtgctataacttcgcgcagtgaaaatggcttcgagatatagtcgtcggctcccaagttgaaccctgttacggtatcgttttcagtatctttagcagtaatgaatataatgggaatagaagcagtagctttattctttttcagcatgttcgccattttgaatcctgatatttctcccatcatcacatccagcaacagcaagttgtattgggtcagttccatcttcagggcttcttcggcagagtttgccgtgtccacaaaatacccttcgttttctaaattgaatttaagaatctcgcatagatcttcttcatcgtcaactactaaaatgcggtaatcattcatatatccatctttttaatactacaaaactaatcttttttgatcagcattgcaaaaatggagcatttttattactatttgatgaaacaaatattacaaaaagattacatgctataaaatcgttaagttctcatcgcagattacaccattttaatgattctgcaatcatcccgccggatgataattggaacgcaataaattatgatttcgtaaactctccggctactggaatactcatttggtaacgtatttctctttcactttttccgtgtcccaaaaggaacatcagtttggttagaacggattccaccgtactgtcatagccgctgatgacccctgcgtccagcagatggagtccggtttcataccttcccatttccactgttccggtagagcattgggagatgttgacaatgatgattccccgtgaggtggcatcccttagaagttcgatgaaccacggcttttgcggagcgttgcccgaaccgtaggtctttaataccactgcgcgtaatcccggtgtatgcagaatattgctgatcatgttttcctggatgcccggaaaaagggtcagtataattacattggtatcataaagatagtgtggttttaatggcagattgggatcggctttgtgaatacggtcatattcatattttatgtggatgcctgctgttgccagcgaagggaaattgtatgaacggaacgcattgaaattctccgcatttatttttgtggtacggtttccgcgcaacagatggttttcgaagaagatgcatacttcgggtacaatagcagtgccgttcggatgtttggcagcggctatttctatggaagtgatcagattttcctttccatcggtgcgcaacatgccgatgggcagctggctgccagtcaggataaccggcttgctcaggttttccagcatgaagctgagcgctgaagcggtgtatgccatggtgtctgtaccgtgcagaatgacgaacccgtcaaaattatcataattgtatttgatgatcttgactaacttggcccacaaggcaggttccatatccgaagagtcaatggggggattgaattggtaagaggagatgcgatagttgaaccgcttcaattcggggacattgtcttgtaactggtcgaaattaaaggcttctagtgcacctgtctcaggattttcaatcatgccgatcgtaccgcctgtgtatattagcaaaacggaaggatattcactctgtatcatgcgcttctcttgtttaattttggcacaaagatagtaattatgtataagtatgacaaaaataagagagggaaataacaaaatgtttttctttataggtgataactgcttctgccggatgctgtggatggaagaagtagaaagatcaggtataagattatagatcttactgctgcaagatatataatcttatacctgtaagatattatatttttcacttgtatcgccatgatctttcaggtggatttttgaagaagaggatgttacgagttgtgaaaggttagtttttcaaggcttccagcagcttgtccgctgctttttccgtatctccgtcttcttcatccagcaaggtcacgaatttactgccgatgatggctcctgcggcatgagcggatgcggtttcgaaggtttgcttattggaaattccgaaacctatcatgcggggattgcgtaaattcatgtcggcgatgcgttggaaataggcttgtttctgtgcgttgaaatctttttgagcaccggtgatagcggcggaagataccatatagataaaaccgtcggtatgttcatcaatcaggcggatacgttcttcactggtttccggagtgatgagcatgatgattctcacatcttgttcctcggctatggaacgatattcctccatataatctttgaaaggcaagtcggggataatcactccgtcgattcccgtctcccggcaagtgcggcagaaatccttgaatccatattgcatgatgggattgagatatcccatcagcaccagcggaatctgtacttctttacggatatctttcagttggtcgaaaaggagcttcagtgtcatgccatttttcaaggcgcgggtggcggcgtgctggataacgggaccgtcagccatcgggtcactgaaaggaatgccgatttcaatcatgttaatcccttttttttccaggactttgatggtgcttgccgtaccttctaaggtaggaaagcctgcacaaaaataaatagataggatgtctttttgcttggtactgaataactggttgattctgttcattgtattttttgttttaattggtttataaatgtgtggacggcggcgtcgtctttcagagccggagcggtctcgaatccgctgttcaggtcgatacctgcccattgttcatgcttgaattgcaacaaaagggaaagactgccgggacggagaccgccactcagcaggaaaggcgtctttccccgataggcttgcaggatattccagttgaaggttttgccggagccgccatatccggagcaggcagtgtcgaaaagaaagtaatcgcaaacgccctcataacaaccggcggattgcaggtcactttcctgtgctatggaaaaaactttaatgactcccagtccggcggcttttaatttgcggcattgttccggtgtctccctgccatgcaattggatatggtgcagaccgaattcctgtgctttcagcaggatgttttcgctgctttcgttgacgaagaccccgatccggtggcattgttccggtaggtattccggacgatgtgatacgtagcgggcagattgggggaagaagatgaagcccatccagtctgctccggcttgctctatggcgcgtatgttttcgggctcgcgcataccgcataccttgataatcattgttgcttcatcctaacatttctctagttgggttataaattcttttaaggcttctcccggtgcgggtgttttcatgaagttttcccctatcaggaagcctcggaagccggcagcccggagttgtttgactgtttcggggctggagatgccgctttcagagatccggagcatttcttcgggtagtttttccgccagacggaaagagttttccacctctgtgtggaagcttcccagattacggttgttgactcccaccatgtcaatgttctcgtctatatattccagttcttgctcgttgtggatttccagcaggacttccagttccagttcatgggctttgagggctagggctttgcattgctctttcttcaaagcggcggctataagaaggatagcgtccgctcctacgatgcgtgcctgataaagttggtattcatctataatgaaatctttccttagaatgggaagttgcacgtgggggcgtgccgaacggatatctttcaggctgccgccgaagtatttttcatcggtgaggatggaaagtgcggaggctccggccgcttcgtaagcgggaggaatggtatctgcctgtgcgtcttcttttatccatcctttggagggagagcgacgcttgaactcggagatgatgccgtaaggagaagaggcaagactggcacgcatactgatacgtggcatgggttcgttacaattgtttatcagcatttctttgctgatggcagccttttgcagttcgatctcgatttgcttgcaggcgatgatttctgttaatatatctgtcattgtatgaggcgtttggtagtggaataccgggtgtgtagtcaactgttcagttccacaaattttttcaatgtattcaatgcttttccgctttccaatgattcacgggcgatggccacgcattcttctatcggtttggccggttccatggcttgtatggcaaaagaagcgttaatcagtacacagtctgtctgggctttggtggctttgttctccagtacgttattgaagattttcgacgcttcttcgggagtgttcccaccataaagctcttcttgtctggcgagagagaagcctagttcggatggcttgtagatggtttcgtagcgattggtcatcactttgaattcatcggtcagtgagatttcgtcgtaaccgtccaggttgtttactacggcaaagccaatgcccagtttttggaacacgttggtataaaggcgcatttgcggcagatcggcgactcctagaagttggtaagccggaagacatggattaaccagcggacctagcaggttgaatatggtacgtacttgcagtgctttgcggacagggcctacacttttcatggcaggattgaacaactgggcatgcatatagaccattccacattcttccatagaacgggtcagcttatccggattgttcgtgaattttacaccgtgttgttcgatgacattgctggctccgctgacggaagtcgcgccatagttgccgtgtttggcaacatgatatccggctcctgctacaatgaagcaggcgcaagtagagatattgaaggtattttttccatcaccgcctgtgcccacaatgtcaataggggtgtaagcggaaaagtctataggtatgcgggtggtgagcaatgcttcacggaaacctatcaattcttctactttgatgccgcgcatttggaaaacggtcagcagggcggctatctgtgcgtcgttatacattccccgggttatgttgagcagcaaattctttgcttcttttcgggtcagttcctcgtgattgaagaggcgggataatatagctttcatatttattatgtacggttggggttatgcgtttagaaagttggctatcatggctttaccatcgggggttagtacggattcgggatgaaactggatgccgtggatatcgtattctttatgtttcaatgccatgacgagaccttcctggcttactgcggttatttcaaggcactcagggaaaccgtccgtatctaccacccatgagtgataacgtcctaccggcacttcatccggcagtccgttgaaaatgtaatcggttttctttcctttgtcttttgattggttctttttaattgagatgggggtctgtacgccatgaaatacttcgctcagattggtcagtttgccgccaaaagcttctcctatggcctgttctcccaagcatacacccagaatcggtttcttgccggcatatcttttaattacttcgagcagcaggcctgcttctgatggaataccgggaccgggtgaaagaatgattttatcgaatttttccaattcttccagttggaaagcatcgttacgtaatacggtaacttcggctcccagttcttttaccaaatgactcaaattgtaggtaaatgagtcatagttgtctataattactgttttcatgatgattcgtttttacatttgttctgccaggatgattgcttttttaagtgctcccagtttgttgtttacttcttgtaattcgtactcttcattgctcttagctacgatgccgccaccggcttgaaaccatagttcgttgttgcggctgacgaatgtacgaatggtgatagcttggttcaatgtgccgttcagcccgataaatccgatgcaacctccataggctccacggctgtgaggttcgtattcgctgatcagctgcatggcttttaccttcggagcgccactcagggttccggccgggaaagtatcaataaatgctttgatgggattggctttggggttcagttcgccgctgacccggcttaccagatgaatgacgtggctgtaatattgagcttctttgtaaaattctacttgtacatcgtgacagttgcggctcaagtcattgcgtgccagatctaccagcattacatgttccgcattttctttgggatcagccaataggttggcggtgagttcagcatctattttcttgtctccgttgcggcgggtggttccggcgatagggtcaatggtggcacgcccgttttctattttacaatgggtttcgggagaggaaccaaaaatacggaagcctccgaaatcgaagtaaaataagtagggggacgggttgatgctgcgtaaagcacggtaaagtttgaaatcatctccttcgtaacgttggataaaacggcgtgaaaggacgatttggaaaacatcgccgcgcatacagtgggcaatgcctttgcggatgttcgccttatgttcttcatcggtcagggtactggtggtttcgcccacggcacggaagtcgtaagtagtatagttacggttgtggatcgctttttccacataatccagatggctgtcctcaccgtcctgcaacatttccagtaataacatttcgttgcggaagtcattgaagacaatcaggtatttatataagatatacaacatatccggagcatcgttcttaggatcacggctgtcttttacattgatatgttcgaaatagcgtacggcattgaaagtggtatagccatacagtccgcagtagttgttgtattctccgcttaccttgaaacgattcagaaaatcggagatcgcatggtctgcccggaaatgttcgctgatgggatgttcttctatgctgccgtcagggtaggtggcagtggctgtgccatgattgattccgatgctggctacaggattcagtccgatgaaagaacggttgttctcacttccatgatagtcggaactttccatcagtgcactctgtgggaaaatgtcgcgcactttcagataggtactgaccggtgtatgcaggtcacccagtatggttttgcatcgggtggtataggtaaaagttttcattgtttcttttctgtttatagttgtccgtatagggtttttgctctcatgggtttctatgtgttattgcaaggaggtccttgtgccggattctttcaagtaggtttcaatatccttatctccgcgtcctgatacggtgagaaccactatatccgttggcttgaatctcattttgtccaatgctcccaatgcatgagccgattccaatgcaggaatgataccttccagccgggtcagctcaaatgcggcacggatggcttcatcatcgtttatggcgagtaccaaagcgcgttgctgtttggccagattggcatgcatgggtcctatgcccggataatccagaccggcagaaatggagtaaggttcctctatttgtccgtcctcgttttggataaccaaggtctttgctccgtggataattcccattttccccagttggatggtagcggccgagaaaccggtgtctatacctttgcctcctgcctcggccaggacaatctgcacacgttcatcatctatatagtgataaatggttcctgccgcattgcttcctcctcctacacaagccatcaagtaatcgggatattcccttccttcctgttctttcagctgctttttgatttcttcgctgataacggattgcagacgtgccaccatatcagggtagggatgagggcctacggtagagccgatgacatagtaagtatcggcagggtggcaacaccagtcgcggatggcttcgtttgtagcatctttcagtgtcatgttgccggaagtgaccgggcggacttcggctcccagcattttcatcttttctacattgatatgctggcgttctacatcggtcttgcccatgtaaacaatgcattgcatgttcatcaaagcgcataccgtagcggtggccaccccatgctgtccagctccggtttctgcaatgatacgttttttccccatacgttttgccagtaacacctgtccgatggcattattgattttatgtgctccggtgtggtttaaatcttcacgtttcaggtagatcttacagccatatttcttgcttagccggtttgccaggtaaagaggtgaagggcgtcctacatagtcgcgtagtaactggtggaattcttgtttgaatccttcactttccaatactttggaataggcattctgcaattcttccacacagcggtgaaggatttcgggaatatacgcccctccaaattcgccataataaccttctttgtttacctgataagttttcattgtcgttctatattttaatgttaattgcactaacgaaaaaaggcctgtcgtaagtacgacaggccttcagtttgaatatccttttagaatgtcaggtatatatacatggtctggttcccttacgacttgtttagttgtaagaaacgccaccaatatgtatttaccatgattctattcataaaatctgtttttattttgggacaaatgtaagcgttttgttttaaactccaaagaaaaacttactttttttttatttatttgcagcttcgtgtattttccctttcacttcttccactttctcacctacttttccggctacttcactgcttacttcttctgctttatgttttgcatgatgagccaggtcttttgcatcttcttgtaagtcctgaatggcatcatacacgtctcttctcaatttgcgacctctgttgctgtgcgcaaaacaacttaatgcactgccgaccagcgctcctagtgccagtccggcaaagaattttccattattcataatcttattactttaaattggttttataaatgaacatttcgggtggcggaatggttttaatacatcagttaataaatcattaaaatgaagtgtatgaaacgtaaactttggataagaataggtgccgtgttgttggcaggattgctgttatggtggctcttttgggctattttgatcgatgaggacgagaatgaacaaagtctgcctgaaacagaacagatagagtgatttgtcataagacaaaaggatgatcttcaggcatgggtacgaaagaatagattggaatagtcggtataacattctgtttgctaaagtctatagaacaatagaattagttctaagcttatggcaggaaaatttgttttggctttctttttttgttcttttgttcttctgtctgaaaattaatatccattttgcatctgtcttctcagaaataatcagtatattcgcttcattaaccaattagacatgattgaatatgaaaacaatgaattattctataatcagatgtatctgtgcgttggtcatcggtgtgttgctggtggcatggcctgaggctgccattctttatctggttattacaatcggtgtgttgtttctagtaccgggactcttttctttatccgggtatttgattcgtggcaagcaggatggcagtcgttttcctattgccgggcttggcagccttttgttcggattatggctgatgattatgccggcattttttgtcggtatcctgatgtatgtgctgggtgctgttttggtactggcgggaatcagtcagattgtgaatttatctgctgcgcgtagttggacggtggtaccgggaggtttctttgtgatacctgtgttggtgctgattgcaggtattgtggtattatttaatccatttacggctgctgctgttccattcatcattctgggagtgagcagcattgtatacggactgtccgatttgataaacatcatccgcttccgtcagaagaaagaaccggggatgcctgaaatagaggatattactcctatagaagagataaaagactaatccgattgatatgaaaacacgaggaagctatattttatatcttttgattttatgtgtggttgtaggttgtaagggaacttcttcaccttccaccgcgtccgaaacggatgagtatgccggaacatgtgagggggaaaaagcgaaagctattttgtgggtggattataaaagaggacgtaagataacggacgggactccgataagaacggtaaaggtttatgcggatgttcatgccgatggaagtctgaaagtgctttcctggtgtaaaaagcagccgatgaaggtagaaaattacttattgaaaagagtggaagtttaccggatcaggaaagaaatattcgaagggggatatctgaaaccgggggaacagtatttgcagttacgctatctgccgggagaggtgaaataatatgttgtaggaagcattgaaaatcgtaggaaaaggtttttgtttcttttatatttcgtatctttgtgtaacacaaattgttagaaatatgaagaaacaaatcttattgtcttgtgcacttgcctgggctgtgatggcaggtgctgaaacgattgacattactactttccgttatgccggcccctacgttgtacaggccccttttcaggtggacagcgtggatgtgaattcaaagacttttgtatccggacgtctgttggacactcatctttctgtggacgtattgcaacagggaactttatttacaggcggggttttgccgggaagtgactcgggatatgccttgcacatgatgggttttgtgttggagaatactcgttatgccacagccaagctgaagattgacgggctgaaaagataccagctttatgtagatggaaagaagcaggaaggaactgaactcgctttggagccggccacccattctgtagttattaaatatctttctgaagcagggaaaacagattccttgaaagtgagtgtggatacggatcaagagggaagcatttcacttaagcaagataacaaaaagctatatactttggcggatgtgttgcatggaactcgttttgccggagtagggctttcccctgatggcagatatttgattgccaattatcgtacgacttatgtaggtggtcggtcagccggtagtacgcgcattactgaacttgccagcggtaaggttttggcggagcgtactgaaaatatgcaatggatgcctcgttctaaccgttattattatacccgtacgggggtggatggcaggcagctgatagttgtggatccgcttaccggaatggaaactgtgctggtgaataaattacctgacgggtatttccagttcgcacctacggaagactacctgcttttcaccatgacccaggaaggtccgaaagaacgtaaagaaatttatgaggtcctggaaccggatgatcgccagccggggtggcgtaaccgttcttatctggctaaatatgatttgaagaccggtttgttgcagccactgactttcggttatcacaatgtctgggctgccgatatttccaatgacggccggtatcttttgatgatgaccagtcagagccgtctgaccaagcgtcctactactttattctcactatatcggttggatatgcagactttacaggcggaactgctgatagataaagatggttttatcagtggagcccgtttttcacctgacggaacgcaggtattggtatccggctcgcctgaatcgctgggtggaatagggaaaaatgtaaaggaggggcagactccgagtatgacggacggtcagctttatttgctgaatatagctgataagagagtcactccgctgacgaaagattttaatcccagcgtacagcgtgccgtgtggaataaggccgacgggcaaatatatttcacggccgagaaccgtgactgttacagtttgtaccggatgaatcccgctgatgggaaaattcagcaactggaggtttcagaagatttggtcaactcattctcattggcgcaaaatgctccggttatggtctattatggacagagcgcctcaaattccgaccgtttatacaccatgaataccaaaaagatgaaatcatctttgttggaagacttaagtaaagacatattgaaagatgtggagctgggcgaatgcaaggcctggagttttaccaattctcgtggtgataccatttatggtcgttattacctgccgcctcattttgacgccaaccggaaatatcctatgattgtgaattattatggtgggtgcagtccggtcagccgtaatttcgaaagccgttatccgcatcatgcatacgcggcattgggctatgtggtgtatgtgatagaacctagcggtgctaccggtttcggacaggaattttctgcccgccacgtcaatacagctggggaaggggtggcacaggatatcatagaaggtacaaagcagttttgtaaagaacatgcttttgtcaatgacaagaaaataggctgtataggtgcatcctatggcggcttcatgacacaatacctgcaaacacagaccgatatttttgcagcggccatctctcatgccggtatcagtgatcataccagttattggggggaaggatattggggatattcgtacagtgaagtttccatggcgaatagttatccgtggagcaatcctgatctttttgtaaaacaaagcccgttgttcaatgcggacaagatacatacgcctttgctgttcttgcacggtgatgcggatgtgaatgtaccggtgggagagagcattcagatgtttacagcactgaagttactggggcgcgaaacggcttttgtggctgtaacgggacaagatcatcatatagtggattatggcaagaggattcagtggcagaacacgatttttgcctggtttgccaaatggttgcaggatgatgcgacttggtggaacgctatttataagccgaaggctttatagatgaataataaaagaaggtgcgtcgtaatgtgaactgcaccttctttttatgtttgttataccgattcattgataatttcccagccattaatttttatactcacaggaatataatcgttgaatgatatttcaatggtaaagtcatgattgtagtcgaaatcaatgtaaggttttttttgcagcagtttgcctataagattttcatcataacggatgactcctgtatcatctgaaatcttcagtcgtggctctctgtttttatccagcttcattaccgtgaaatcggctatgagagaagatgtggtgtttgatggatttgagtaggtgggaagataagtaattttttcatcatcggcatactgcaagaaagagtcatatttcccattgttgtcttcaatatagatgatatgtttctttttatcattcaaattatggacgataacttggatatggttggtgatttgttttaagtcaatccatacaatgttttcttttccttctctgattttcacaatgtcatgtattccatgatagagcagactaggctggttgatagtttgattgtctttttcacgtttcagagataaaaagaaatcgtgtatgtcagtctgttgtggaatgcatgcggacaattggtaacaggtttcatcataacctgtccaggctacgaattgatagctgccttgtttgaaaggcagtttcatggtgtagtcgtcattaacttgatttaatgagtcatttatttgggaaacgaatgttcctttgtcatcaaaaataaaaacagccagcatggcgtttggagggaactctgtttgctgatgtatgcttttgtttgttgcgtagcggaatttgagtcccaggactgtatagtcctgagaacagcaacattcattctctttaatgcaattggttagaacaaataacaacagaacaagagatgccagtttcaatctgattttcattttgttaatgaataattattacccatttatagatcatggtcttcctctattacttcccatggaatgacttctatatctgcactgatccatgtgttaggctggataggttgattattatcaaaattatcggatggttttcccggggcttgtatggaattgacagtaattttgaaatattgatttcgatatatattataaggtgcttggggcgctgttacgttaccgttgacctgtacatgaaaataacatatgccattggtgtaggtattgtctgccaacacataatcaccggtgagtgcaggcatacctgtagtattgtttgcacaaagttcggcatatttttctgcaatagcaccatctataaagtaattggctgtcccatcagcggtatgtactacataaaaagttgttccggggccacttgtattattctctattgtaaaatcactttcaccggtaggggagtcatttttgctagttacgattttggcaggagtgaagactccgctgatactgataaaagtgctttcatttacatttgatgttcccgatacatattgaaacgtattttccggagcataagagaagacagagggaggagtatcatttccgtaaacgtttatagcatctgtgcctcttgaaaaatcttgctctgtatagctgttccagttatagtctttgacaattccatctctgctatcttgaataaaatagaatttcttatttaagtttcgccaaccgaatttcaaatctgtcatggatcctcctccttttactttaaacgtaggtgaagtgaatacagcactctttgcagtaacacggctgactggtattgaaatatgatgtttttctgcttcggctttatcttcatataaatttgtggctggagtgatattgggataattttcattaaacataatgaacccgtttgtttgatctgccagtttgccgacctcttgcgtaaactctttataattgaatgctcccaagccattagaggtaatataatctacaatttctgtattcaggtttactgccgcaaagatatatttatccgcttttttggtattgacgggccgagtggtaatccattgggaagtatttccgggggcttgttggagtgtgtttgcggcaacgctgaattctgctaccgtagaagtgaaaggtgcttccttatcgtaaataaatatatgaagggattttacgatattttctgcatctgttcctggttcagtggaacgggtggttacagagcgtgttcccgaagtatgggggatactgatggagaaagatgcgtatgcttctggaacttgcatttccagctctggctgattggcgaactctttgtcattgttgcacgaagccattgccaaagcagtgactatggttataaacattttacttgttttcatattcttattgttttaatgaatatgattagaaccaagaacctctgtcttttgtttcaaaataaaacaaacttgaacaattatgagtaaattaatggctatattggttatcatctttttatgtatatcttgtacagataatgcagaattacccgtaaagcccgataaaaatgaaggtacagaaaatgttttgatagagttggctgtaactgtaccggcggtcacctatacccgtacaagggggatagttcgtacgattgatcatgaaactttgataaatgagattcaaatattggtatttgaggagggtaaatataaatatcgtgtgccggggttgtctatcaacaacactgcttctaccataacttttacggcgttactgaaatccggtgatatccctatgaagttattgattttggcaaatgccaccgatgtggtagtggctgatgagcctgtcgttggtgatagtgaagaaatgataaagaagaaaatgaatcgaaaatttgattatctgacatctgtttttcccatgtctggagaatatgaattgccggaaggtttgaagccgacgggaacaggtactattttaggattgaaaatgttacgttccatagctagagtggatgtgacagctacggaagtggctaattttagaatgacaggggtaaaagcttatcgggccaataattatctgcaagttattccggatgaaacgggagtgagcaaagtaacttttccaagtgtacccgaaggtagtgacaggaatgtggacagttcgatatttcctgtttcttcagagaattggaataatttttccgcccggctttatttatccgaaacttggtcgcctgaacctgcagaccaggtagataaagctacttgtatagtggtagagggatactatgctgatagcaatacgccaagttattatcgaatggattttgatccggataataaccataatgcttttgggcaagttttacgtaaccataaatatatatttaatataaagaaggtatcggctccgggatggagtacgccggatgatgcagcccataaccgttcatctaatatagtggcggaggtacaagcatgggatgatgatactatggatatgtattttgacggagaacatcatttcggaatatcaacacgtgaagttgttttgaagcataaaaccggctctgagggaattattagtgtcagtacagaccttttggattatacgttgcagtgggcagatgatgcaggtgtgctccaaggaaccggagcccagtctttgtctaatgattattttacagtaacgaaggaggataatggaagtcggttggtgataacagctttgcaaaataatttggcagatggtagcaaccgtatacagcattttgtgattacagctcagcggtggactatttatgtcagcatacagcagaagtatgatatagcagcttataaaacgatcaatttgatgtcatttacttccggtctggggtatttgggtactaatattttaggttctagtagtgctgaagctcgtgctaccggacttcgtggtattttgactaatcaaactaattttggacccgatggggtagtggagtgtggcggttataatttggtgggagtaggggttaatgctaataatttgacagatgctcttttttctctgtttgatgtagtatatataaattatgtgccaacctcgcagtttggtagtcaagatgctcataaacttcataactggctgaaaacaaagaagaatcgtgtcttgatcgcctcttatgatgcttccgatgtaagtcagaatttgttagcggaaattcttgcggggaagagtggcatcaaatattttacatcaaacggaggaccttatcctttggctgcttctactattggtaatcattattttactactgacggaccttttaccaaaaatgctcctgtcacttcgaattttgcattacggaattatgatatatatcatggtgagatacaggtgaatactagtgcttctgagggcataactcctattttgatggggcctggtgggggaatagtgttgggtatagattattccaggagaattgtatattggggggatacagatatgagcagtaatttatccggtacaggggcgactagtgagaatcacattaataacacagcaggaaccatcaataatgatgcttccaaattgatagccaatgtttttgcatggattaccgaaaccgtattatatggggaatgagcattgttatgtgctctccctatactgtttcggtgacattcctgtatatcttttaaaatatttcccaaagaatgagatgtctgggaaattaagtgaataggctatttcctgaatggtaaagtctgtggattttagtttggcttccgcatctgttatcactagtttggcgatgatatctgtaacagtttttcccgtaatcttattgacagtagtgctgaggtgctgaggggatatatgaagcaggtcggcataaaaagctacactccgttctttcgtataatgtttgatgatatattggaccaggcgtttcacaatttcttctccacggttgaaagtacgtgtggttacattggtgttctgatgaatgctgcctacaccgtgcaatatagtgagcagcatggtgctgattaactctttattgggcttggctcccatacgtttcatttttatcagcaaccggaaatagtcttgaaacaactcggttatttcgggacgcagagggataatgggtgtgtcaatcagggctgaaagatagttcatggtggaattgaagagatttattccgttcagcaactctttgttgaatcctatcaagtacagacgacagtcgggactttgccggtgaacatgtacaaaggtttctggcagaatagtgacaatgtcgttcttttgtatcttgtgttcagacagatggatcgttatgtcacattcacctcgcaggcacagaaggaacaagcatccttccattcgttgcggatagtggtaaatacggcctaatgatcctgtcatgtcaatttctgcaacgaaatccttattcgatttaaataagttaatgtcatctatatacttcataaaaataaagaaggttttgattatgcaccacaaatatagggcagttagagcagataacaaagaaaatgcttaaaaatagactaatatatcttactgttagcacttgtacgcttttaataattataagaactttgcagcgaaactaatagtgaagataaacagtatgaaaggtaaaaatttgtctattatggcaatgattgcggcagtgttctgttcttgcggacagcaacctgcacaagaacgcggtcctcggcccgtgaaattggcggaagtgacctcgttaagcaggatcgaaaaatcgtattcaggtgttgtgtcgcctgatcagttcagtgacttggcatttaaaatgtccggtccgctggtagcaatgaatgtactcgaaggacaacgggtgaagaaaggacaggtagtggccgaaattgatccgacagattacaaactggattatgacgctaagagggcttcattccaaaaggcgtcatcacaaatgcaacgcgcagagaaactgttggccaagaatgctatttccatgcaagagttcgaaacgacccaagcttcgtataccaatgccaaatcggcatttgaaaatgcgcaaaacacattgaatgacaccaaactacgcgctccatttgatggctttatccaaaaaaaatatgttgaaaactatcagcgtgtacagccaggacaaggagtggtgtgtttgattaatccggctaaattgcaagtggagttcactatccccgaaacgaatatttcttatgtaacttctccttctactatttacgtagaatttgatgcctataaaggaaaattatttcaggcaaaagtaaaggagtatgtagaggcttctcccgatggggcaggagttcctgtattcctttacattgatgatccggaatttgatttgaaaaaatataaggtatcggtgggcttttcttgccgtgttattgtcaatattgagaatgatgtggtaaaagaaggaattacagtgcctttgtccgctgtagtgtttgataataacttgaatagcaagatcgtatttatatataatccgtctacacagaaagtagaactgcgtaaagtcagtgatgagggaattattgtaggacgtaacgacctgatagtatccggaaatattgaaccgggcgaacaggttgtgtctgccggagcgtcttatctggtagatggccagcaagtaaaaatattaacagaataaaaaaggagagagcatatcatgaatattccaaaatattctttggagaaccggaaggttatctatttctttttggctattttgttgataggcggagtaatctccttcttcaagctgcctaagaaagaagatgcgccttttgtgataaagactgcggtattggttacccagtatccgggagcgaatccacatgaagtggagaaactgattacggaaccgattgaacgtgaaattcagtccatgacagatgtatatcagattaaatcggaatcttatttcggactgtctaagatttctattgaacttcagcctacgattgatccggattatatgcctgtaaaatgggacgaattacgtcgtaaagtggcgaatatacaacctaagttgcccagtggggcgtctaccattactgtaaatgatgactttggtgatgtgtatggtatttattatgctttgacagctgatgagggcttctcgtataccgatttgcgtgactgggcacagcgtatccgtactcagctgaccccgattgagggagtacagaaagtaatgttatacggagagcagaccgaagtgatcaatgtcaagatatctacctccaaactttcggcattgggtattgatcccacttcgattatgggcatcttgcagaagcagaatatacaggtgaatacaggagatatagcgacagaaatttatcagttgcgcttgcgtacggaagggacttataccagtctggaagatatagaaaaccagttgattatcagcaaggacggacgggaagtccgtttgggggatattgcaacagtggagcgtggatactatgatccgccttcaaccttgatgcgggtcaatggtaaacgtgctatcggtataggtgtggccagtggagcaaaggataatgtggtggctgtgggtaaagcagtggacgaaaggttggcggaaatagagcaattgttgcctatcggcattgaactgacctcgctttatcctgaggacaagattgctgatgaggcgaataatggctttatcctgaatttgatagaatcattggttattgttatcctgattatctttgtggtgatgggatcgcgtgccggtatgctgataggtagttccttacttttctcggtaggtggtactttgcttattatgttgatgtggggggtaggattgaaccgtacttccttggcggcatttattatcgccatggggatgctggtggacaatgccattgtggtaacagataatgcgcagataggtatcaagcgcggaaaatcacgttatcagtcattgatagagggagccatcaagccgcaatgggcattgctgggcgctacttttattgctatctgctctttcctgcctttgtatctggcaccggcatccgtggctgagattgtgaaaccgctatttgttgtattggctgtatcactgggattgagctggattctggctttgtgccagactacgacttttggtaattttattttgaaagaagctgttcccggcggtgcaatgaaagacccgtatgatactaaactctatcataaattcgagaagtttctgaccttgctgattaaacgccgttttgtgacattgaccacggtttttgtaactttggtgctttctttggttattatggctgttatgcctcagagttttttcccgaaaatgaataagccttatttccgtgctgatctggtattccctgagggatttagtattcatgcggtagatcaggatgtgatgaaggtggaggattacttgaagaatcatgagaaagttaaatcatattcggtgacattgggtggtactccgttgcgttactatttggcaagttcttcttttggaccgaagtctaactatgccaatgtgatggtggaaactaaagaccccgaagatgcagccgaagtagaacagcagttttatgagcacatgactcagaactttcccaatatcattacccgttcggcactttttgctttgtctccggtgcctgaagctgctattgagatcggttttatcggtgaaaaccccgatacattgaccgcattggttgaaagggcgaaaaaaatagcccgccagtgtgatatggtgacggatatccgttccaactggggagataaggtgcccgtgtggaaaccgatgttctctcaacagaaaggtttacgcttggggattacccgtcagcaggttgccaactcattccgtacggctaccaatggtttgcctttgggagaatatcgtgagggggatgtttccttgcctatcctgctgaaagatgaggatgtggaaaaaatgaacttgaatgatgtgaaaagtgtgcctgtattcagtacgaaaggaaattccgtgaaagtggaacaggtaatcgataatttcgctttgggttatgattataatgtagtccgtcgctttaaccgcgagcgttgtatgatgatgcaatgtgaacctaaacgtggagccaatacgatggctgcgtttaaacaggtgcttactgccgtacaagagcagatgcagttgcccgaagggtataaaatgaaatatttcggtgagcaggaaacacaggatgtaagtaatgctgcattggcgaagaatattccgctgactttcctgttgatttatgtggttctgctgtttcttttccccagcaactaccgcaagccggtattgattatgcttatgttgccgctggtgtttatcggtgtggtatggggattgctcttgtttggcaagtcattggacttctttgccatcctcggtttgttgggattgattggtatgaatatcaagaatgccattgtgctggtcgatgaaatcggacttcagttgaaggatggaaagggggctgtgcctgccgtggtcgaggctaccaagacacgtatcgttccggtgaccatggcttccggaactactattctgggtatgcttccattgttgggcgatgccatgtttgcaggtatggcggctaccattatgggtggtttgttcgtatcgacggtactgaccatttttgttcttccggtaacttattgtattttctttaaaatcagagcagacagataatgaaaactaagatgatctatattataggtatggcttgtatgaccggtacactttcggctcagactgtcgtggattattctacctttgaacaaaaggtactggattatagccaaaccttaaaacagagtgtggcacaacgtacagctatgcagaaggctatgaaagcggcaaaaaccgctttcttcccggctgttgatgcaacgggaagctatcagtatcgtattaacaaatacgagatggatcttggcggaatggctgttcctatggagcacgattcatacagtgccgaagtaggggtatcacaacctatttatgccggtggaagcatctatcacaattacaaggcttcccaaatacaaacccagatggcggataagtcggtggatttgacaacggataatattatctatgctgctgaagccagttattggggaacagccgcacaaaaagaaatgtatgaaacgatgtgccagtatgtgcagattattgagcagttgaccaaagtgctgcaagataagtacgatgatggctatatcagcaagacggatctcattcagatgcagacccgtttgaaagaggctgaattgcaacgttccagcagctaccagtcttatcaggtcgccttgcagaatatgaatgtgctgatgggattggaaccgctggctgaaatggatttgacggattctatttctaccatattgcctatgcctgcttttattggagcggaaacagccttgaatgtgcgtcccgattatgctatctcacagttggatgtggattatcagaaaagacaggtaagtctggctgccgccaagtacaatccttctctttctatcggttttaaagagacatggggaacacagatgttgaacatttcgggcgaaactatgtttaatagtaatgtgtatgcctctattaaattgccgattttccattggggagcccgctttaaatcgacggctgcacagaaggctattttattaagcaagcagtatgcattgcaagataagcaagaccaaataagcaaagaagtggcgaaggcgtggactagtctgaccgagaatacccgtcagataagtattgccgaggagaactgcaaactggcagaagagaatttggatttgaacacttttagttatactgaaggtaagttgactattttggatgtgctttctgcacagctgacatggatacaggcatatacaaaccttatccaatcttattatgagcagaagattgcgttggctgattacagaaaagcaaccggtataaggtatttaggacagaaataggtaaattcagaccagattcttattatataaaaaagtcacaataaagcaggtttggctatctttgtatccagacctgctttatttgtttttattcagtttatgtttactgtaaagcttgttttaacagtggaaaaaagaatagattacaatgaagaaaatatcattttggatcgtaatctttatatgtatggcagatgcggctttggcagtcacgcaagagggtgggctgttttatttgcctgaagatacgacaatgcaacacaaagacagcacagtacagaaaaggacttttttcaaaaagtttctggactattttaatgatgctaataaagataagaatcataagaaatttgatttcagtattattggcggaccacattacagtacggataccaaactggggctgggactggtggcggcggggctttatcgtaccgatagaaatgacatgcttcttcctccatccaatgtgtctttattcggagatgtttccactgttggcttctatatgttggggatacgcggaactcatatctttccgcaggacaaataccggctggattatactctttatttttattcctttccttccaagttttggggaatagggtacgatatgggtaaggtagatgccaatgaatctgatttagatcgctggcaagcacaagttaaagctagtttcctgtttcggatagcggataatctatatataggtcctatggtatcttatgattatgtgcatggtaagaatatggaacgccccgaactactggaggggatgaatcttactactgctaattatggagtgggcctttctttggcatatgattcgcgcgatgtgttgaccaatccccataagggatattatttgaatattacccagtgtttccgtcctaagtttttaggaaacgattatgcattcagtactacggatttgcgtaccagttattatcatcctgtatggaaaggaggattgttggtaggagaattacgcggtacttttaatttcggtaatccgtcatgggccatgatggcgttgttgggaaactcgtattccatgcgtggttattacgaagggcgctatcgtgacaagcataaaatagaggggcaggtggaattgcgtcagcatgtatggaaacgtaatggtgttgtagtttggataggggccggaactgtattcaataagttcagtgctttgtgcatggacagagtgttgcctaattatggaataggttatcgttgggagtttaaaaagaatgtaaatgttcgtctggactatggatttggaaaaaatggacagtctggttttatctttaatataaatgaagcattttaaagaatttattcagtggtgttgtgagccacaacggttgttcgttctgttcatcgttgtcttggccattcccaatgtggcattgttttttacagaacagcaaatgacactttgggcacgtatttgtaatgtcattctgccggtatcggtttattggttgattatgacattggggcgtaaacctggaaagactatttggatcttatttccgtttgttttctttgcggcattccaactggtattgctatacctgttcgggcgttctatcattgcagtagatatgttcctgaatctgacaactactaattccggggaggcgctggaactgttggataatttactgccggctgtaattggtgtttttgttgtttacattcctgctttggtcttgggaggtttttcatgggcccggggtaatcagttggaatattcttttattcgttctcaacgtaagtatgccttggcaggcattgttgcaggagcgttattgaccgttatctgctatgcgacgcaacgtgattatcaagtaaagatcgaaatgtatccggctaatgtatgttataatctagtattggctgcagaacgtgcgggcgaaacagccggatatgcggaaacttcaagggattttacttttaatgccagtgccgcacatgatgaaaacagccgggaagtttatgtcttggtgataggggaaacggcccgtgcctgtaatttcggactttatggttatgaaaggaatactactccattacttgataaaatggagggggtggtaactttcacggatgtgcttacccagtctaatactactcataaaagtgtgcctatgttgctttcggcagcttcggctgaggattatgactgtctttatagacagaaaggaatcattaccgctttcaaggaagcaggatttcatactgcctttttttcgaaccagcttcctaaccattcttttattgattttttggggatggaggcagatgattggaagtttatcaagaaagatgctccgaaaggagccaatatttcggatgacgaactattgtttctggtagaaaaggagctaaaggcaggtcatcaaaaattattcatcgtgctgcatgcctatggatcacattttaattataaagaacgttatcccgaatccatgtctgtctttaaaccggataatctgacagacgccaaatatgagaataaagagtatttgatgaatgcatatgataataccatccgttatacagatggtttcctggcttctttgatcactttattgcagaaaacaaactctttttcggctatgctttatacttcggatcatggagaggatatttttgatgataatcgaaaattatttttacatgcatccccagtcccgtcttattatcaactgcatgtgccatttttaatttggttgtccaaaacatatagagaaaagaatgtggaagtacatgaagctatattgcagaaccgtgaaaaaccggtggcgggaaatgcctccgtgtttcataccatgctgaatttggcaggggtacagacaccttatagggcagatagcctatcggtagcaaacagacaatatctcattcgtccgcgttattatcttaatgaccataatcttcctaagtcattggataagataggattaaaaaaggaagacatagaacagttcagacggaataatcttgtttttccttgatgtgaaaaagatttaaaatggttggagaattataatagaattacgtattaatgattattttcgcacagctttgttattgtatttattacgaaaactattataatccttttattatgaaaaacaagaaaaacaatttctatctgatgggagtggtgtttatagccattctcggcggtttacttttcggttatgatacagctgttatttcgggggcggagcaggctctgcaaaaacatttgggattagatgctttctggcatggcgtgactgcttccagtgcattgataggttgcgtcattggcagtgctttttccggttattttgcttcggggctaggacgtcgtaattcgttgcgtctggctgctttattgttcttcctgtctgctttaggctcttattatcccgaatttttatttttctcgaaaggagatacttcgtttgcattgatccttgcttttaacttttatcgtatcatcgggggaatcggtgtaggacttgcctctgctgtttgtccgatgtacattgccgaaattgccccttccgaaattcgtggtaaattggtttcctgtaatcagtttgctattatttttggcatgttggtagtctattttgtcaattatatgattaaagatggtatgccggatgaagtgcttgtttccgatggttggagatatatgtttggttcagaagcggttccggctgcattatttggcattttattgtttttggttcctgaaactccgcgctatttggctatgacccatcaggatgataaagcgttttctgtacttgaaaaagtaaatggaacagataaggctaaaactattttgtctgaaataaaggctgtaacttccgagaaaacggaaaaactgcttacatacgggctgacagttattgtagtcggcatcttgctttctgtatttcagcaagctatcggcattaatgctgtgctttattatgcaccgcgtatttttgaaaaaatcggtggcggtggcgatggtatgatgcagactgtggtaatgggggtagttaatattctctttacattgattgccatctttaccgtagagaagatgggacgtaaacccttgttgattgttggttctattggcatggctgtaggtgcattctgtgttgcgttttgtgatgagtttcaggtggaaggtattcttcctgttctttccatcatagtttatgctgcattctttatgatgtcatggggacctatctgctgggtgttgattgcagagatatttccgaatactatccgcggtaaggcagtggctatcgctgtagctttccaatggatattcaattatctggtttcttccacttttcctgccatgtatgaattcagtccggtatttgcctatgggctttatggcgtgatttgtgtgcttgcagctctgtttgtgtggaagatggttcctgaaacaaaaggaaagactttggaagatatgactcgtctttggaaagaaagagcaagataagttggtgcgatgccggaaacggtgtctttcataccggagaatagaaaccatccctttcaacttaacaaatagaaagttggacgcgaaaatgccctcatgccctcactttggctctaactggtttataatgaactgcttattagtgatggtagtatctgtgttagtgagggcattgccctcactaacacagatgcttgaaaataaattattctaactttatcatgtgatataaagtatcttttctgctggcttttgggtgaatgttcagtttgcggataatgtgtctgtattaatttatcttgttgattgacaggtttttcacgcttgtactcttgcaaataattgaaaatcttcatgtgcggtcagcctttctcccttcttctctgtagtggcggaatagaagtgacatttaaacaactgttccaaaggcgaaatttactcaaattcggtgttgttttgccaaaataccttctcattttcatcattcaacccataacgttcgttcttataaagcagctgcatggcttgtgcagcgagttggcggtagtctatgtatgcatatttccctgtctcttatctgttttctcccttttattttctcacttttatatgtttgtaattgcttattcactactgtgactaagtttaattacagtagtggttaaagttaactacaatagtgattagacttaattacattcgtgattaacagatattgaacttttaatcgtcaaagaagaacagtatgatacaaactacgacaccgttatttatgccgtttgtgcaaggaagaaaaactgaaaaaacagggggcttaccaaataaccggtttataggcttgtgaatgtatattatattgtgaatgagtgtcttaagagatgagaatgaggaataaggagtgagggtaatgactttacaatgagtgggttatagttggaaatgagggcatgagtgggaacaacttatagagcatcattatgacatatttaagtatgctcagcatagatgccccatacattatcttgctgtaatgtataaaaaagagccgtatcattacttgggagtagagttgatacggctctttttatggctgataaagggtgtcaaagtatcctcggatgaaaagtccttttcctcaaaggttgtgttttgacacctttttctttttatcaggatgggattgttttatttcttttcccctattgttttcagcatttcttgtacggctgcttccaactgctggtcttcacctgccaatgccttttctggagtattataaacttcaatgtctggagaaagttggtgattttccgcatattgtccacgcatatccatacaacccacctgaggaataccgaacacaatactcgggtcgatctggttttcccaccatacggcagtcattgtgcccggaaccggagcaccaatcagtttgcctatctttaattccttgtaaacccatgggaagccatgtgcgttactgtaattgtcctcgcataccaatacgcaggatggcttgagccatttattgaatgggtcgctgcctatgtattgtccgcgtggaacgaaacgctgatattccttgccgcttaataaagtggccaagtcatcatgtagccatccgcctccattgtggcgtgtgtctacaataatagcttctttgttgcggcagcgtcccaatacttcactatatacttcgcggaaactttgactgtccatgccttttacgtgtacatagccgatgcggtcttcggataacttatcgactatattgcggcaacgttctacccaacgtttgtacagcaagttactttgttcgcccatgctgatagctttgatggtgatatcaaaacgtttgccggtagccggattatatatggccagtaacacttttcttccggctttgccttccagcagcgggaagtagtcttgccctttcacgataggtttgccgtcaattttctcgatgatgcaaccgggagtaacatccgtttttttcacggcaaatgggccttttgccaatatttctttaatttttaacccgtcaccatcataagtttcgtcatagaatactcctagggtcgctgtggatagtatagggccgtttgagtagtaacgtgctccggtgtgcgaaccgtttaactcacccagcatttcactcagcatttcctgaaaatcataattgttattgatgtatggaagaaagcgtgcgtatgcttcgtgatagcctttccagtctactccgtgcagatcttttacatagaatttatcttctacttgttgccatacatgatcgaaaatatattcgcgttcaccatagggttggtagtcgaagaaagcttcgaattctacaggtttggtttcaccactgctgacagtgactttcttgataccaccttggctgcaaaggaacagattctcgcctttcttatcaggaagcagggctccgccaccgacttttttcatgacgattttagtcttgttttctttaagatcgtgttcccataaatcatatccgctttcgaaggctgcttgataatatagtttgtcacccttcggagttaatacagcatctcccaatcgtgaagaatttacagtcagacgaatcacacggtcacggctgttttcaaggtcgaaaaccagtggctttacttccttcttgtcatcttctttcttggagtctttctttttatcttttttatgatcggccttctccttctcttcactcttctctttgtctttcttttccgagtcttccagcaaggcaagctcttccttgctcattctgaaacggtcgtatgcgtccaggtcgaagaacatgatatagatatccgcttcagcaccccagcttccgtgactgcggaatcctgcgcggtcactttcccaaatcatggcttttccatccaatacccatttggcattgccgtcactgtatccactttcggtcagattatgaatttctccgttaccagatgcgttgaccagtgcaacatccttgttattccatccgccaatacctatgtagttggtaagaatccatttgctgtccggactccattgataccattggtcgccgtcactataagaatattcgtacttgccgtccatgacggtgcgtacagcttttgatttcagattcagaacacggatggtagtacggttttcaagaaaggctacttctttgccgtcaggactgtattgaggttggaatgaagtgatatccgaattggtcagtctttcctctttgatatcggttgcgtaagcgaactgtttttcttcctttttagctagactggtttgataaatctgccataatccgtttctttcggcagcgtaaacaatacttcttccgtccggagaaaagtgaatatcgcgttcctgttgcggagtattggtgatttgtttggtagtgctgtattctgttgatgtgacatatacatctccgcgtagtacaaaagcaatttcctttgcatcgggcgaaagggatatctctgttgctccgctacgcttgatctggcggatgagatctttgtcgttcttgtcggtgacaatggaaatctgaactttttgcggaatggcaccttcttttaccgtgtagatttcgccatcatatccatagcataatgttccattggaggcagcactcaggaagcgtaccggatgtttggtatggttggtaatttgtttggatgtattaccgtcaatatcacgtttgaaaatattaaatgagcctttttcctcacttaaataatagaatgatttatcatctgaagcccaaacgggagtgcggtcctcaccattgaaagcagtttgtttgcgaaaggtacggtttccattcagagaacacagccaaatatcgcgggtaatggatgaagtgtgatgtttacgccaagggtcttcatatccttttttgtcatggtagagtaaagtattgcctgtatgattgatactgatatcttccatcggcatggaagagaagaggatggggcgtccgccttcggtattgacttcatatacttgttggaattgtccggaggggaattgtgcgtcttctgctgttggcattatattggctagaaacagaatgtgtccggcatctttataagccaccggtgtttcattacccgaatgggtagttaatcttttggggatacccccttccttgtttacctcaaaaatatccatacttcccattcggtctgatgcgaaagcaattttttttccgtcagggctccagatgggtttggtgtcgtgggcagggttggttgtaatctgactggccctgccgcctgtagagggtactgtgtagatgtcacctttataggtgaatgcgatggtggttccatccggagaaatggcacaataacgcatccataatggattgtcctgtgcatacgtggaaattgacaacaaaattgccgccacacctagtagctgtcttttcatgtggataaaatgttgtggttaatactaagttatttcttttttttcaggaaatatcctctgattctttgcatgatcttgataccggtccgtactccgtcataaacggcgattcctgtattgatatgttgcataatgccttctacgcctcctttgtgttctacaggcgcaaaaagttcatgtatggtttgtaccatttcttttttagcttgctgtacttcttccaacttctcagcttttcgttgtgctatcacttccaaagtgatgatgggcgttttattaggagtattctctttcataatcagttgtcatttaaaagcaagttggcaaggaaatttaccataggctgaacaatcagccgtttgcggaataaaacgattaacagaatcagcagaataatgcatccggtaatgattccataactggccataagcccgcctacatgaggtgcgagtacataggccaatgtaaatgataagtagaaaagggcgataatacctaatatcaataatataaagacaaggatgagggttgatatcagtatagtaagtttttctactaaatgtagttttacataatccttttgtaactctgcgtactttttaagctctgccagaagttgttgcagattatctatatttttatcgtttgcaaacatgcgtggagttttgatttaaaaattattgtcattccggacttgtatccggaatgacaatacacttttgtgggcgttgcttattcttttacctcggctgcaatttcatcgaccagattttccatatctgtgcgacttaatttgatacctcttttacgtaaagcatcagcaattttgctacgagtgtcttctccgctttcaggagcaaataaaataccggctgctgcaccaactacggctccgcctaggaatgcagctaaaatacttaatcctttcatagttttttgttttttgtaccttacaaatctaacaaataaaactgaatgttgttgtttattttgtctatttttgaatagaaattggagattcttctctgattaactaaatttaactccgttcttgctgtgaaagctgttgatatattgctacttttgcaccaatataatggaattaaactagagtattaatttataaaagattgagtaatcatgaaaaaattagttgtgttgggtatgggattgtgcgtagccttggcattttcctcatgtaaatctagcgaaagtgcttacaagaaggcttatgaaaaggcaaaacaacaggaattggctgaagctcctgccgatcaggtagaagcgactccggttgaagctgctccggtagtatctgcccccgtgacaactgctcctgttgccggtccggttcgcgaagagaaagtagaactggtttcaggtgacggcttaaaagcatatagtgtagtatgtggtagctttggcgtgaaagcgaatgcggaaggtctgaaacaatatttggatggtcaaggctataatgccaaagtggtttataatgctgaaagaaatacgtatcgcgttatagcatcttcatacgatgaccgtgcggaggctactcaggcaaaggaggaatttaaggcaaaatatcctaaccgtgacgatttccaaaaggcatggttactatatagagtatattaatgatttctttttggtaaattaagaagaaaatatagtctatttttctttattaaaagcggcaacttcacagttgccgcttttttttatagctttgctggttctaaacaacaataaaaactaagggtatgaaatattatggcagattatcggtcgctgctcttttggctatagcaccgctgtatggctttgcccaggaaaaggtggtacctataaaatacggagatatggatcagtggataatccgtaaggttcatgaatccggtgttataggcggcaataccaaacttctttatgagataggccctacaaaggaaatagatggtaacaaaccttataagaatatgggagggtctccttggggaacctctaatgtgatggctaaggtagtgggcattgttaaaacaaataattctgtttacagggacaaacgggacaatggatattgtgctcgtctggaaacgcatatagagagcgtcaaggtattgggaatggtgaatattactgtattggcagccggatccatttatttgggcgatatgctggagccgataacaggaaccaagaatgctgagaagaatatgaattggggagttccttttacccaacgtcccaaagctgtccgttatgattataaggtaaagatgtctggtgagaaagatcgtatccggttgacaggcttcagcaagaaaggtcaggtggcagggcaggattgtgcgataactgttttctttttgcaaaaacgtatggaggacgctgaaggaaatattactgcgaagagggtaggaactatggtggtgaagtatgataaggactcggatggttgggtgaatggtgctacttatgaagtgctgtatggtgatataaccaagcatccgtcttatgatcatgaaacgatggggttgagagagagagattatactagaaatagtaagggagaaagtgtcttgattaaagaaacaggatgggcggaggtcaatgagaatcctacccacatgatactgcaattttcgtccagtcatgggggagcttttatcggttctcccggaaatacgctttgggttgacaatgtgaagctggtctattgaagataagtaaatgcttttgtttgtgtaatgttgcaggtgcaagatatatatcttgcacctgcaacattatatgccctttgcttatatatcctgggagtattttaaaaaagctttttgtttgtgatatagcccggtatcttgttacaagattcggtaaatgctgcctctggtttccagaattgtatagccaagattcgtagattcttgttatacggtttgtttgctgttgctgcttatgtgattaaaaatgcagttgaagaaaaaaagagggagcatcgtttgttacgatacccccttctttaatttatcagagttttatcaggtagcaatgattattttacttccagaataactacgcggttcagatagttcttgccaaacatgttgtctgttccacccatagcaactttttcaagttggctttcttttacgccttctgcaaccaatgcatcgtaaacagcctgagcacgtttttcagacaaagtctggttgaatgaagcagatcctgtagctttatcagcgaagcctgcgattttgtacttggcgttaggattagctttgatagctttagccattaactgtacattaaccataccttccgaactgatttttgctttaccgatcttgaagaagatagcaacttctgcagcgctaggaacttctttaatcacttccttgactacttctttcggaacttcacgaaccacttccttgatcacttctttttctactacacggtcttcaactttagcaaacttcttgccgccaaaagtatagcttacacctgctgtgatcatacctgtaccttctgccttacggtgatcgctgatgttaccgaagattgaaggagcgattgcaccacgagcttcaacatcgatagcccatttattgtttaagttaaactttaaacctaaaccggcagaagcgcctatacgagctttagcttttgcttcaccggatgtagaaacaccagttctttcacctgtgttgccatcgtaagtataaacaacatttgcagattttgcaacagataactgaggacctacaaaaccataaacttcaaagaaacggttaggattagcgcctgcaaataaagatgacaagtttaccattgcatcaatattcgctccaacatagttcttgttgtgttcgtgatagccaatttcttgtaaacataaactttgccatattccgttcacttgaccgcgtattccccaagtcggagtaatatatttaccaagcgaaatactgaaattcggagatattctgttaaatccatcgtttgctacagagtgtataccaccacctacgctaataaaaatattatcgctccatttcggagtataataattagtttcttgtgctttaattgttgttgcacatacgcctgccaataataaagacagggttaaaaatttatatttcattatattatgtttttagtgattaaatcaaaatattaactggctattagtctgcaataataataccaccaccggcattgctgtcatctccatgtccatgaccgtggccgtgacttggagcatgtccatgacccggtatttgctcatttttaggagaaactatagtattgtaagaatcgactgtgaagcttgcaacaggatttccatctcttttaggtgatttttcgattatctgataaacagatgttgttttcatatagtccacaaaaacactaaaacgagaatgtgctaatacctgtacatcatttagagtcactttgtcttctcggacacctttattataagcatctataatgttctttatttcgctgtcgtctccctcataatcgttctttataactttactaccttcttttttagtgtaagttactgtaatgtaataccaataatcactggtattatccttgaacccactgtgtttagttgtttctatttgagaattactactttcttcttgtgcaaagaaattctcgcttaagataatagtaacttcttttgcaccgaattgacctgcttttagtgcaggaatagtaactgatgcagaaccagtcattcccttgtattttgcatttatattaatggattcactagctagttcaggtgtaccttcgtaggttccgttacctttactgaaagaaatttctgcactttgagttacatctgtacctgtagtcgcatcaataaccacgggggttataataaattttgcatttacgggggtaacctcaattccaatattttccttctcacaagaagtaaacattgttgttgtcaatgctactatggccagtgccaatttagcacttaaaccacttaaaaatttgttttttttcatctcgataaaattaaaattttaataattctgatttaataaaatatggattaaaactattactttccattatgttgtcactcgtttcagctttatattgtttataatattttcgttcatttcctgcgttataaataattcccatattatttgagaagtttacacgcggtatatatttatgtcttttgtttttataaaaaggaagcgcgacttgaaacctgaatccaccattactgttggcatgttctgctttcattgcgtaaaaacctatggacgcatatcggaaatgacgtatcatttcaaacttgatacctttttctcctaataaatatctttctccttttaagctaaattgtgtattatatctcggccaataaaagtttcctccaattgtccatgttgttgtcattttcgtatcataatgtagcttgaagccattccaataacctatacctacataaccaatacgtgcttctatagagaaacgttcgtctttaaacggataaaacaatgataaatcacttccccatctgtctgcattaaaatagcctatagttgctttcccatatatattatatggcagacggaaacgctgggaaagggttatatgtcccggatgaactttatcttccaatatcccatatccatcgttatacacaggtatctttatctgtcctgttaacttacttcctggccataaggaaacttcaatagctgggcttaagtcaaataacacctgatatatttgtgtaataatcatattcatatatgataattgaggatataccataatatctactttaaacagcgaactgttctttttcttttctttcttcaccttgtcccaactgtcacctatatcataactgactttccagtcttcaccgcttaccactgttgtgtcaccggcaagaggctgataggtcagtgagacctgaggtatattatagttggtaacaatcaacttacaagatttgtccttgggtaatcccatcgactgtatgatatctacagcctttctgatgcccaacgcttgaattttgtaagcactgttttcaaccacataaactctttcttcaggagtatctgtccatcttacattttcaaatcccatttttacaagactgtctgttgttaattctcctgttgattggctgaaactttttaatggaatcataacaagcaacaatatagctatacaatacaacaaacatctatatgaaactcctttggaagagctctgatttttcattttataacaaatacctgtttcgatttaacaattatgcggcctctacgttaaaccacatattcggtgcaaaaataagtactattttttaaatagcaaataaaattaaacgaaatgaatcattccttttgaaaaaacagttgaaaaagcatattttaatctttatatataaaataggtatggaataaatttgtatttttgcaaactatatgagtagaatattagcgatagattacggtaaaaagcgcacaggtgtggctgtgacggatgttttgcagattattgcaaacgggttgacgactgttcctacacaccaactactggactttattctgaaatatgtggaaaaagagcctgtggaacgcatcattgtggggcatcctaagcaaatgaataatcaggagtcggaaaatatgcgtaatattgtcccttttgtcaatcaactaagaaaaaaaataccggatataccggtagagtttgttgacgagcggtttacgtccgtattggcccaccaagccatgttggatggaggcttgaagaaaaaagacaggcagaacaaagccttggttgatgaaatcagtgctacgataatcttacagtcttatttggagtcgaagaaatatatttaataaataaaaacagattaagaaaaatgatattacctatttatgtgtacggacaaccggtgttgcgtaaagaagcagaggatattaccccggattaccctaatttgaaagagttgatagcaaatatgtttgaaaccatgaatcgtgcagatggtgtgggcttggctgctccgcaaataggtctgcctattcgtgttgtaactattgatttggatgtgatgtctgatgacttgcccgaattcaaggatttccgccgtgcctatataaatcctcatattttagaagtgggtggagaggaagtcagcatggaagaaggttgtttgagtttgcccggtattcatgaagcggtgaaacgtccggaccgtattcatgtgacttatttggatgaggaactgaaagaacatgatgagtgggtggaaggttatttggcaagggtcatgcagcatgaatttgatcatctggacggaaaaatgttcattgatcatttgtctgcattacgcaaacagatgattaaaggaaagctgggggccatgctgaagggcaaggcgcgttgctcctataaggtcaagactataaaatgataactccgcaattttgatctatgcgccaccagtggcgcatttgtgggaaaaccgtatttttataaatacaaaatgataaaacggatactctatacattattaataatgttccctgtagtggcttcggcacagataaatacggacagggtgatggcgatagggcgtaatgcgctttattttgaggattatgtcctttcgattcaatatttcaatcaggtgattaatgcaaagccttatttgtctgatccttatttctatagaggtctggcgaagataaatttggatgattttcagggggcggagagtgattgttcggaggctattgagaggaatccgtttgtggtaagtgcttaccaggtgcgtggattggcacggatccagcagaataattttgcgggagctatagaagattataccaaggcgttggagtttgatcctgagaacataggggtatggcataatatggccctttgccgtatcagacaggaggattataagggggcgaagaatgatctggataagctgatcgccatttccccccgatatacaaaggcctatttgatgcgtggtgaggtggatttgaagcagaaagatactttggctgccgaaaaagactttggcaaggcgattgaaatagaccgttatgatgcagatacatgggccagccgtgctatccttcgtctgcaacagcagagatataaagatgcggaagccgattttgatcatgccatccgtctgtccacccggaattcaggtgtttatatcaaccgtgctttggcccgttaccatcagaataacctgagaggagcgatgagtgactatgatattgcattggatattgatcccaataatttcatcggccattataaccggggcttgttacgtgcacaagtaggcgatgacaaccgggctattcaagactttaattttgttatcgaaatggagcccgacaatatgatggctattttcaaccgtggtctgttgttggatcagacaggagattataaaggggcaattaaagattattctacggtgataaatgaatatcccaatttcttgctgggatatcagtacagagcgcaggcgcgtaggaaaataggggatgtgaaaggtgctgatgcagatgaattcaaggtgttgaaagcacagctggataaacagaacggagtagatcctaataagcagactgccgataatacggagaataataaaacccgtaagaagtccgacaagaacatgaacaactatcgtaagatagtggttgccgacaacgaagagggagaagaaaaatataagagtgactatcgtggacgcgtgcaggataagaatgtgaatattgttccccagcccatgttcgtgcttacctattatgaaaagcacgatgatgtgaaacggcaggtcaactattataagttcattgaaacattgaataatcagaaagtacttcccggccgtctgattataactaatgaggaagctcctctgacggaagaacaagctacaaaacattttgcatccattgacgaacagactgctgccattgtggctgatccgaatgatgtgaacaaacgttttgcacgttcattggacttttatctggtgcaggattttgcaagtgccattgaagatttgaatcaggctattattatagaagatcatttcttcccggtttatttcaaccgtgctctcatccgttataagcagctggaataccagaagatggaaaaagagtatgatttgaaagccggtccgggagagaagagtgccgtgaaagctgcggactatgaaatggtaaagcgcgatttggacaaggtgattgagctggctccggattttgtctatgcttattataatagaggtaatgtgctttctatcttgaaagactatcgtgcggcaattgttgattatgacagagccatccagttggaccctaaatttgcggatgcttatttcaatcgcggcttgacacatattttcttgggtaacaacaggcaaggtatacaggacctgagtaaagcaggtgagttggggcttttctctgcttacaatatcatcaaacgctttacggaacgaaaagaataacatttttttgctaaaaagaggataagtcaaaaagatttcgttatttttgcatcctcaagaaagaatataaatagaagattatgataaagataacattccccgacggctccgttcgcgaatataacgaaggagttactggtctgcagattgcagaaagtatcagttcacggctggcacaagatgttttagcttgtggcgtgaacggtgaaacgattgatttatctcgccctatcaatgaagatgcaaacttcgttctttataaatgggaagacgaacagggcaaacatgctttctggcatactagtgcccacttgctggccgaagcattgcaagaactttatccgggcattcagtttggtatcggtccggccattgaaaacggtttttactatgatgtagacccgggtgaagcaatcattaaggaagcagatctacccgctatcgaggccaagatggccgagttggctgcaaagaaagagatattggtgcgtcagagcatcgctaaagaggatgcgttgaagaaattcggtgaaagaggtgagacttataaatgtgaattgatttccgaactggaggatggacacatcaccacttatacacaaggtgcgtttaccgacctttgccgtggtcctcacttgacctctaccgctcctatcaaagctatcaagctgcttactgtagccggtgcttattggagaggacaggaagaccgcaagcagatgacacgtatttatggtataactttcccgaagaagaaaatgctggacgaatatctggtaatgttggaagaagccaagaaacgcgaccatcgtaagataggtaaggaaatggatttgttcatgtttaccgatatggtgggcaagggacttcccatgtggttgccgaaaggtactgccttgcgtatccgtttgcaggatttcttgcgccgtatccaggcccgttatgattatcaggaagtaatgtgtccgcctattggcaacaagaacctgtatatcacttccggacactacgccaagtacggtaaggactcgttccagcctattcatacacccgaagaaggggaagaatatttcctgaaaccgatgaactgtcctcatcactgtatgatttataagaattctccacgttcttataaggacctgccgttgcgtatcgcggaattcggaaccgtatgccgctacgaacaaagtggtgaattgcacggactgacccgtgtgcgcagttttacacaagatgatgctcacttgttctgtcgtcccgaccaagtgaaggaagaattccttcgcgtgatggatatcatcaacattgtgttcaagtctatgaattttgagaatgtggaagctcagatttctcttcgtgacaaggtgaaccgcgaaaagtacatcggtagtgatgagaattgggaaaaagccgaacaggccattattgaagcttgcgaagaaaaaggcctgactgcgaaagtggaatatggtgaggctgcattctatggtcctaaattggactttatggtgaaagacgctatcggtcgtcgctggcaattgggaacaattcaggtagactacaacttgcccgaacgcttccagttggaatatatgggctcagataaccaaaagcatcgtccggtaatgattcaccgtgcgcctttcggatcaatggaacgttttgttgccgtattgattgagcatactgccggtaaattcccgctgtggctgactcctgaccaggtagctattctgcctatttctgagaaattcaatgagtatgcggaacaagtgaaagcggaactgagaaaattcgatgttcgtgctattgtggatgaccgtaatgaaaaaatcggccgtaagattcgtgacaatgaaatgaagcgtattccttacatgttgattgtaggcgagaaagaagctgaaaacggtgaagttgcagtccgcaagcagggcgaaggcgacaaaggaaccatgaaaatagaagaattcggaaaaaatcttgccgaagaagtttctaatatgataaataaatggtaactttgcagccgtttgcaaaagagcgcattgttaaacctttatgtattcttttgcgttaagataaagaaatactaattaaaataagaagaaacaaacaggaactaaaagttttttaatgaagaatgacagtttaaaagggcaacacagaatcaatgaacagattcgtgccaaagaagtccgcattgtgggcgacgatgtagaatcggcagtttatccgatagctcaagctttaaaaatggctgaggatcatgaggctgacctagttgaaatttcacccaatgctgttcctccagtttgtagaattattgattattctaaatttctttatcaattaaagaaacgtcaaaaggaacaaaaggctaaacaggtaaaggtaaacgtaaaggaaatccgtttcggacctcaaacagatgatcatgactacaacttcaagttgaaacatgccatcggattcttgcaggacggagacaaggtgaaagcatatgtgttctttaaaggtcgttccattcttttcaaagaacaaggcgaagtattgttgcttcgttttgcgaatgacttggaagaatatgcaaaagtagagcagatgcccttgttggaaggtaagagaatgactatttctttggctccgaagaaagcgggctctccgaagaaggcagaaacggatactgctaaaaaggaaaatccgaaaaaggcagtagaaacaaaagaatgaaaaaagagtgcgtaacgcgccggtatagtgcgttaccaccatttgaataataatttaaaattaaaaacaagatgccaaagatcaagactaactccggttctaaaaaaagattcgttcttaccggaacaggtaaaatcaaaagaaagcacgcttttcacagtcatattttgactaagaagactaaaaagcagaaaagaaaccttgtacactcaggtctagtagctaatgctaacttggatcaggttaaggaattgctttgcatgaagtaatctaaaaacaacgaaagcgtaaacgtattatttaaagtattaaccgaatgtctttagctttaagttcaccgtgtgaaacagtggcgctaacattcaaaaagaattaaaactatgccaagatcagtaaatcatgttgcttctagagcaagaagaaagaaaattttaggtcttaccaaaggttactttggtgcaagaaagaatgtatggacagtagcaaaaaacacttgggaaaaaggtttgacctacgcataccgtgaccgtaagaacaagaaacgtaatttccgcgctttgtggattcagcgtatcaacgctgccgctcgtctggaaggaatgtcttattctaaattgatgggtgcattgcacaaagcaggtatcgaaatcaaccgtaaggtgttagctgatttagctatgaaccatccggaagcattcaaagcaattgttgctaaagcaaaagctgcttaattcttctgtaaacggcgatataaagatttatgaaagagcaatctctacgaggttgctcttttttattgcggatgccttgtgatgtttccttaataaatggaaacaacaataagcagaattacagagagttattttcttgcttattatttttaacaaacaaattctgctatactcttgtttatatcataaaaaggacgtatatttgtcatacggaaagagatgaaaagcgagccgcattagttggattgggaaactcatcaaactaatctgaaaaccgagacatagcttcatcttccaatggcgggccacgccttcgggtagcatttatgccggtggattacaaaggaggagagcactcaaaacctgtcattcggagtttcatcgcatcactggtgcggcttcattataaggcgatgctaattcaaaagattagcatcgcttctttttataaaaatagtacggatatgatattttacttttcaggtacaggtaattcggcttgggtggcaaggcagctggcggaaggacagaatgaggaattgttgtccatagctatggaaatagacaggaacaaagcgtataagctgaaagaaggggaaaaagtaggttttgtttttcctgtatatgcatggggacctcccaagatagtacttcgttttattcatcagctaaagttggataagccgggataccttttctttgtctgtacttgcggagatgatacaggccggactgcacaaattttttcttctgccgttacccggaaaggttggcaatgtgttgccggctattcggttactatgccgaatacgtatgtttctttgcccggttttgatgtagatgataaagatatagaaacccagaaagtacagaatgctgttgcccgtgtgcgttttatcaacgaagaaattacatcaagggctcaaatgaaacaatataattgtcatgaaggtgcgcttccatttactaaatcctatttgctgcgccctcttttcaatgcttttctgatgtctcccaagccttttcatgcaacggaagcctgcattggttgtaagaagtgtgagaaggtttgtcctgtgggcaatataacagtgacggatcgtcccgtttggggaggtaactgtactcaatgtctggcttgttaccatgtttgtccggtacatgcagtggaatatggaaagatgaccgggaaaaaaggacaatacaaaggaaggttgctgaaagatttatagatacacattaaataatccattgggagggcggacctatagtccgctccttttattttatttttcgccggtttaacgcttgttgatagcgtcttgcattagcttgatgctgggctgctgtgacagcgaaattatgagtgcctgagaaatcttcttttgcacacatataaatataatgatgctgtgtatagttcagtacgctttccaatccttggatggatgggattcggataggtcccggaggtaaacctgcatgtttgtaggtattataaggagaatccacttccagatgtttgaaaagaatgcgtttcagtccgaattcctgtaaaccaaattttaccgtcgggtctgcttgcaacaacatccctttattcaatctgttaatataaagtcctgcgaccatgggcttttcgggaccattggccgtttcttcttccacgatagaggccagggtggacacttcttcaggagtaagtccgatatgttgagcctttttcagcctgtcattattccaaaaggcagcatgttctttttgcattcgtttcatgaaagcgtcagcactcatattccaataaacctcgtaagtgttaggaataaaaagggagggtagtgtctcttgggtatatcccatttgtgcacagtaagcactgtcggaaattaatttggcaatatccagagaatcaatcatgagctggcgcgaaacggcccgcactaatctgtccacggtgcgtacactgggtacagtcagattaatgggagtctggtatcccatggaaagacgtcggaagaggtagcgcatattgtccgatggattgagagcgtaacgtcctgtccgtatattgtcgccatacttctctttttctgccagatattgaaaaccgaacatacttttaggatgtccgttccggattattttatggtatacagaatccaggttatcatctctgtctatataaatataggtggtttttgtaagttggaattgtttggcaaagaaatagtaatatatacttcctgcaccgcctgctcctgtcaggataatgataaggataacaatccatacaatagtacgcttctttttattcattttagtctatcgggcttttttgtatgcaaatataggcaaatatccgtttcttttctacttttgacgattttgtacccctaaaaatacaattttgtccactatccggttgatgtaaaatgtgtaaatttgaccaaacgaaaaacgagaacgcaaatatagtataattaattattttatttttaatcatgaaaaatgcacttatgggcttggcattgttcgctgcaatgccggtatttgcccaacagaaagcgactatcaatgtacatcccgagcaagggaaagaaatcatcagtaaacatatttacgggcaatttgcagagcatttgggaacctgtatctatggaggcttgtgggtaggtgaggattctaaaattcccaatacccaaggctatcgtaatgatgtgcttcaggcattgaaagacttgaaagtgccggtgcttcgttggccgggcggatgttttgccgatgaatatcattggatggatggtatcggtccgaaagagaaccgcccccgaatggtcaataacaattggggaggtacagtggaagataatagtttcggaacacatgaatttctgaacttgtgtgagctgataggttgtgagccttatatcagcggtaatgtaggaagtgggagtgtggaagaaatggcgaaatgggtggaatacatgacttccgaacaaggtagcccgatggcgaaactgcgtaaggagaacggtcgtgaaaaaccatggaaagtgaaattctttggggtaggtaatgaaagttggggatgcggaggcagtatgcgtcctgaatattatgcagacttgtaccgccgttattccacttattgtcgtgactatgatggcaatcacttgttcaagattgcaagtggtgccagtgattatgactataactggacagaagtactgatgaagaatgtaggtcaccgtatggccggtgtgtctttacattattatacagtgatgggatggagtggaagcaaaggatcggctacacagttcactgatgatgattattattggactatgggcaaatgtctggaaatagaaccggtgctgaagaagcatatggcaattatggataaatatgatccgaagaagcaaatcggtttgatggtggacgagtggggaacctggtgggatgaagagccgggaactgtccgtggacatctgtatcagcagaacacgttgcgcgatgctttcgtggcctctttgacactggatgttttccataaatatacggatcgcatcaagatgacaaacattgcccagattgccaatgtgcttcagtctatgattttgacaaaggacgacaagatggttctgacaccgacttaccatgtctttgaaatgtataaagtgcatcaggatgctacttatcttcctttggaactgaactgtgaacgcaagattgtacgcgacgaccgtattgtcccgatggtaagtgctacagcttcacgggatgcaaacggtttgattcatatttccttgtctaatgtggatttgcaggaatcgcaggaaatagagttgaacttgggtgaggtaaaggccaagagtgttaccggccgtattctgactgctaacaatataggtgattacaatagtttcgagaaaccgaatgtggttgccccgaaagaatttaccggagcaaaggtcaataaaggaagcttgaaagtgactcttcctgccaagtctatcgtagtgctggaagtgaaataaaacccgtacgttcgtgtgcccccacacatacgtatgtgtgggggtatacatacgtatgtatcgtttcatgcctgcgtatgtgtgatagactacggtaattcttgtaccaactccgcttcgattctgttttctatttcatccggcagggcagggaagaaatcgatatccgttcttttctctacgctgtctactgttaccatatatttcttcagtggcttatgtccggcgctgttggggaaaataaatcctatggcttgcggatttttcttatcatttatcaatatgactttatagaaagcatgggggactgccactttattgttgccaattcttttggggcgtttagtatcatatataggtccgcaggcaatatacacggctccatatttttttgcccattggcgtgacttttcctccaggtcattccagtcgccgcggttcagattcggattttgcggacaaatgttgctcatataaaaagattcttccatggcttgtttgttccatttcatatcggcggcaggggccatgtgtccccggtcgtatcctgattttgtataatctcccgtatatgctttggctccacgtacgtccgggtcgggcaagaatttatttgttcgcccttcttttccttttgtttcttttttagtaagttcccacgccacccattgtggagttttgtaatcggcattataagacagggtatatcctttacgtttcagaatctggccgcctgtacttgattgtatcatcggaatttccaatgcaccgccatgttggggcgaggtcagtatttctggcttttcttcattgctttcgatagtggggatattttcaagcagtttcccgtcaaacaattgatgtttatatgccaaaagtcccagtaatactaaaataatgatgactctcaggggactattggattgtttctttttctttgcgctcatatttgttctgttttaggggtgcaaagatagaataaaatataaaaatacattatctttgtccattatatagctgtaaattttaataatactgacatgctatcctaactaatcaaacctattatatatgaaaaagaaccgattatcgttagcgttcctgagtctgctgattgcagcttctcctttacgggcacaagatacgctacagaatgaaacagtcgagcagaaagacaagagaatggaatggttttcacaagccaagttgggtatctttatccattggggaatttattccgtcagaggagtgtccgaaagctggtccttctttaacaactacctgccctatgatgaatacatggagcaggaaaaaggtttcacagcctccaagtatgatccgaaggcttgggtggatctgataaaagaaagtggagccaaatatacagtgataactaccaaacatcatgacggagttgcgttatgggataccaaagtaggagatatcagcgtcgtgaaaagcactccggcaaaacgtgatctcatagctccctttgtaaaggaagtaagaaaacaaggattgaaacttggcttctattattctttattggactggtctcatcctgattacccaaacaaaacccgtacggaagtacgttataaaaatgatcctgaacgttgggccagattcaacaagttcaatttcggacaattggcggagctgaacaaaacctggaagccggatctgtattggttcgacggggattgggagcaaagtgcggaagcatggaattccaaaggtattgtagatctgctccgttcggataataagaatgtgattatcaattcgcgcatacagggatatggcgactatgctactcccgaacagggagtgccggtggtgcgtcccgaggataaatattgggagctttgtatgaccatgaatgattcatggggatatcagcatacagacagcaactataaatcaccctatatcttgcttcgtacatttgtagactgcctgagcatgggcggtaatcttttattggatatcggtccgaaagaggacggttccattcctgaagaacagatcgctgtgttgaaggagttcggccgatggaccaagaagcataaagaagctatttatgaaactcgcgcagggattcctaccgagcatttccagggatataccacactgaataaggcgggggatattctgtatttatacctcccttacaaacctaacggtccggtggaagtaaaagggctgatgaacaaagtgaaccgtatatgggtggttggtaacggagctatgttgaattacaaggtctacaataaaaattattggaactcagtaccgggcaatctttatattgatgtaccccaacaggtacaggatgagcagattaccgtgctggccgtgttgctggatggaccgatcaaactctatcgtggagtgggacaagtgcaagataataactaatctgaatcagaaaaatagatgaagaaacttatttataccctgttgcttctgctggttacttttccggcaatggcacaaagcctttttgaacaatatgaacgttttctggccgaaccgcgtacctatgtatgttatcgtccggatggaaagttgaaaatagatggtaaactgaatgaaagttcctggaagaaggcggcgtctaccgctccgtttgtagatataagcggcgaaggattcccgactcccaaatatgaaactaccgccaagatgctgtgggatgatgaatatttatatgtaggagctgttcttcaagaagaggatatcaaggcacgtcttaccctgcgtgataccatcatctattatgacaatgactttgaagtgtttatcgatccggatagcgacggacacaattattttgaaatagaaaccaatgcgcgtggcgtgattttcgacctgatgctggacaaaccttatcgttcgggtggaaatttcatggtgcaatgggactgccccggattgaagaccgccatccattgtgaaggtacactgaataaatcaaaagataaagataagtattggagtgtggaaatggccattcctcatcaggcgctgaccatgaactttaacaatccgttgaaggctggcaacacctggcgcatcaacttctcgcgtgtacagtggctgaaggagaaaggacccgaggaaaattgggtatggactcctaccggaagaatcgatatgcacatgcccgaccgttggggatatctttatttcgtagacaagcaagtgggaatctcgcaggatgagttggtttatccgtacaatcaggctatctataaactgctatgggctatgttctacgcacagcaggataattatagtaaacaacataactacttgcgtgccacagaacaattctttttgactgataaagagttgaaagatcttccggctgatgcccggattgcggtggaagcgactcagaacacctatcagatagctataaccaatcctgctgaaggagtccgttatgtgataaataatgaaggacgtttccggacagaaaagatacctgcccgtgaagttaaaaactggttgtggatgcgtctgaataaccgttcggatgccgaatggaaaaaatggtttgcgttgttgaaagaatgtggtatttcgggtgtcatgttcgagggatacaatgaaaatatttatcgtctttgcaaagaagccggactggaggcacattattggaaatggacgatgaaccgcagggaactgctggacaagcatcccgactggtatgccgtgaaccgtaaaggcgagtcttgtcacgacaaaccggcctacgtggattattatcgcttcttgtgccctaatcaccaaggtgtggcagagtatctggcagaagactatgtaaaggaagcccataagccttatgtggatggtgttcatctggattatgtccgtatgccggatgtaatcttgcctgtcagcctatggaaaaactatggtatagagcagaaagaagagttgccggaatatgactattgttattgtgatgtctgccgtgaattgtttaaagctaaaacaggacaggatccgttggagttaaagtatccgatggaaaaccagagttggatcaatttccgtctggatgccatcactcgtgtggtggatgccattaccaaagcggtgaaagccgatcataaagctatttctgccgcagtgttcccggggccgtccatggctcgcaagatggtgcgccaagattggggagaatggacgttggatgcttattatccgatgatttataataaattctattatgaaggtcctgaatggatcgggcgttcggtaaaggaaagcgttgaaacggtgaatgggcgtgccaagatatatgccggactgatgtttggtgatattaaggacaattttgaagaggcgctggatgaagcgtacaataacggggcatccggtgtatccttctttgatggtccggatgaagaatatttgcataaattcaaagcttatctggataagagaggatttgtggtgaagtaactccgtactgttagatccttatattagagaaataaatctctttttagcggtcactttcgatttttatcgtaagtggccgcttttgcgttttatcatttgttcttttaatgagtgcggaaaaggaatttatgtgttcctttttggtctttcttggatctatcttgaaaatgaatctgttagaataaaaaaaatggagttctcttagtaagagaaccccattccgctgcaaatgtagctataataatccaaatacggaaatcttttattcaggaatcagtctctgataaggattcttataatatttgtttgcaaattatccatctctgattatgtgtaaatatcttattgtcagcagtatatgtctttttggggttctcttactaagagaaccccaaaaagacatacataaaaagtaatgttttgatggtaacagaaaatagtatggagcttgaaaatcaagcgttcctttcaaatcaagacataacgggcgaagcgcctaagttactgctctgcagttcaatcgcttccggctcagacctggggtcaaatgaaggaatcacgccaatggcgggaataggaaaagaataccctgaactcggctggtattatctgtatctttccaacaaagaactgaaacgctatatcagtgttttcagtggcaggaaagctgttcggcttcgtacaccatcaggtaccgtagaagagagatttttttgcttcaaggtgttttcttacactgccaccgatcataggaaacgtttcgagcaatgtgcttataccaaagaggaatataccgctcgccgtgactctgcccgggtggtgaaagaggcttttgctaccggctccactcagaaactgaatgcgttgacgaacgagaaagggattgaaggcaacggttggctgtttgtatgtgcccccttggggcagttggaatgtattctgtctgccatgcttccccgccagtatctggtgacggactataacacacaccgtgcggcggtaattcctcaacgtcagatggaggaatttatttatctgtatgaatccatgccttacaatatcgagctgatgaaccggcctttggaggactatcttcagaaaaagcaacgaatccgtattaccggtggtgtctttcgggggaaagagggatgtatcatgcgtttgcaccgcaatacaaggctggtattcgcttttggcaatatgacggtggcagtgagctatcttcatgcgtttccgtttgaaaaaattgattagtttaattaaagccatccatacatcccttgcaggacgatggatggcagataagactacagacgcaactaaggttgcaagtctatatattcagctgtgacatggaaacatggacaggctttttgcggattcaagtcatgatggcctacaatcagtgccttgggataacgttgatgcagttgttcaatcagttttctcagcgtagccttttgtgcttccgttcgggtgtctttcggcgttgttccgccatcatccagtccgcctatgtagcatatacctatactgtggctgttgtggtgcttgcaatgtgctccaaccaactcttccgggcgtccggcttctatcgttccgtctgtaggaatcacatagtggtaaccacagcacttccagcccaatgaacgatggtagcggtcaatgtcctccgctcgcaaggcactgcccgccttgttggcagagcagtgcacgataatcaacgaaaccgttctcataagccgcttccaagtgctcctccggcagcgcctgtaatgagcagctcaatgatgcggacgatgtacagcagtacatttttccagttctttttcatacgctttgtctttaaatagatgaataatataagttccatgacgttaaaagattcgtggagtcattttatattccatatctgcaaatgtctccttgagtttgcgacacggggcaaacacgatgtgcgcgcccttgatgtttttcttggagaacaaagcctccgaagcggctccttcgcatttcagggagacactgaatgttccgaggccgtccagggtgactcggtcgccttgggcaagatgctcggacaggcggttgaagacttcctccagcaccgcttccatcatgccgtgtgggaaaaagcggagatgttccgtcacttcctttacgagtttcttatgcgaaaccgtttcgttgggcacacactttgcgtatgctttcttgggcatcgtcctgtcggacgcatttctcatcgagaaaacgtggtattttatcataatgacggattgttttcatttgtggaagccggggtctttcctttggcggcatccaagtcgactgtgcctttaccggccttttcggccttcagggtggcggcttgggctatgcggcttgctacgggattgaaagcggcgcgggaacgaagattttggaagtcttctcccggcgtgaacacaatgttgacggcggtgatgttgctttctgtaaatttcttcaggtcttccgcaccttccgagcctatagaaatccagaaattacctaattctgccagttgtacttttttgccttccagaagcatttctacaaggcactcgcacatatcggctattacaccttttaccgttccgcgagtgaatacgccattgtggtcggcaatgtgtttgacaaactggctgaatggcatgatttcagaaacttgagcttttgcatacgctttttgggcggcatcgacatccatcgggttgcccatcataaatacactgtaatcaatcataataaaataaagtttaaaagttttgtgtttccgggatgttcgttcatccttccgacacgacaaaattaatgcggggaaataccgtaaaaaaatctatttattatcgtttactaactgttgactgccgttcactagctattgactgaccgttaactacccgttgacgaatcattcaaacaataagcttatggatagtgagacacacttcagcatcgtcttcaatatttatggaggcagcaaccagattcttcccaatgctacttccgccacacagaattattatggtgatgaggcggaactagagaaggatgatgtaagcaaggacaaggaacctgctttatctcccgaggctacgcgccttttctcttatataaataaggtggaggatttacgtatctatctggtacagatagcagaatgtaccaatgcggtggaactggccagggttatagttaagatgggcgaacgggaaccgaagattacttcggaagagatggtgaaggagcgttttatctcgttgttctttcctctcacacctttgttcgtatcggtcaagactgtcagtaatatccgtgcgcgtatcaataacgcttgggcaagacgaccgagaaagcggttatgaccggaggtgaaaaactggtgaaaagtgtggaaaaaagtaagatatgttcgtgggcaaagtaagttcacttactttgctgtttaagtctacttactttgcttgggaatatatcttactttttcgttaaataagcattaaaagataatccaatttttgacccaatttatagggaaactgctttaatgcggttttctttataggatgtgtcaaaatgagatgctaatcctaataaatccatgtttaatttacagcaattcattgcagaccatgtgatttgtcgtccgacaagtatgtttgcagcagatattgaagctaataaagaaacgcttcaagcagaaataaggaataaaagtgtatgcgtcataggaggtgccggttccatcggttcttctttcattaaagcagtcttgccgttcaagccctccaaactgattgtaatagacctgaacgagaacggattggcagaactgacacgtgacctgcgttccacatacggcatgtatgtacctgcggaatatcgggcatataccttgaactttgccgatcctatctttgaaaggatcttccgtgaggagaaaggctttgacattgtggcgaatttttcagctcacaagcatgtccgtagtgagaaggacaaatattcggtacaggcactcattgaaaacaatgatatcaaggcaaaaagattccttgacctgttggccgtttacccgcctaggcacttcttctgtgtctccactgacaaggccgccaatccggtgaatatcatgggagccagcaaacgtattatggaagatatgattatggcgtattcttccaagttcaaggtgaccaccgcccgttttgccaatgtagctttttccaacggttctttgccggatggctggatacagcgtgtcatgaaaaagcagccgttggctgcacccaatgatgtgaaacgctactttgtttctccggaggaaagcggccagatatgtatgcttgcctgcatactaggtaagaatggtgaaatattcttcccaaagttgggtgaaagacagatgctcactttctcttccatttgtgatgagtatataaaagcggttggctgcgagaaaaaagagtttgcaacggatgaggaagcgaagaaatttgcttcggatatgacttttgataataaggattacccagtggtgtattttaaaagtgatacaacaggtgagaaggcatacgaggagttctatgtttctggtgagaaaattaatatggatcgtttttgcagcctgggggtgattgaggaagtggtgaaacggccgatgactgagatagatgcattctttactgaaatggagaatatatttgccgaaccggattttaccaaagaagaggtggttatggcgataaagcgtttcatccccaactttgaacatgaggaaaaggggaagaatctggatcagaaaatgtaattaaaacgatatacagctatgaataacaacgctgaaatctgtgaattcattcaccatctttttggaacacaagattttgttcctctgagtgctcccaagtttatcggaaacgagaaaaaatacctcaacgaatgtattgatacgactttcgtgtcaagtgtcggtgcttttgttgaccgctttgagcacgatatggctgtgtacaccggtgccaagcgtaccgtagtctgtgtgagtggtaccaatgcccttcacatggccatgctgctagtgggtgtagaacgcgatgatgaggtgctcacccaagctctgaccttcatcgctacttgcaatgctgtcacttatatcggagcatatcctgtttttattgatgtggacaaagaaacgatgggactttcgccccgagctgtcaaggcatggctggagaggaatgctgaactgaaagaaggagtttgctataacaagcgtaccggtcgtcgtgtaaaagcttgtattcccatgcacactttcggccatcccgtaaaaatagatgaactggcggatatctgccgtgagtggcatatcgaattggttgaagacgcagccgaaagtatcggcagtttttataaaggtcgccataccggtacattcggaaaggtgggtgctattagctttaatggaaacaaaaccatcactacaggtggtggaggcatgttgcttttccaggatgaagaactgggcgcatacgccaagcaccttactacccaggctaagatacctcatcgttgggagtttcgtcatgaccatattggttataattaccggatgccgaatatcaatgccgctctaggttgtgcccagttggagaatctagaccgctatgtggcagataagcgtgaaacagcagcctgctatgctgagtttttcaagggtaaggaagatattactttttttactgaacctgctgattgcaaatcgaattattggctcaatgcggtggtactaaaggataaggcggctcaacttgattttttggagtacacaaatgatcatggtgtgatgacccgtcccgtttgggaactgatgaatcgactgcccatgttcgagcattgcgaaacggacgggctggagaataccgagtggctggctgaccgggtggtgaatattcctagtagtgtaagattagataaatgaaaaaaatcgcagttgtcactggtgcacgttcagagtatggactgctacgttgggtgatagatgagatacatcatgctactgagttacagttgcagcttatcgttacaggcggacacctgtctcccgaacaggggttgacttatcgttgtattgaggaggacggatatgatattgatgctaaagtcgatatgttgttgtcctcggattgtgcttctggtatagcgaaatctatggggatgtgcagtattgggatgagcgatgcttttctgcatcttcagcctgatatgattgttgtcttaggtgatagatatgagttgcttcccatagttggtactgctttggtgatgcgtattccgatagctcatatttcaggaggtgacatcactgaaggagctattgacaatgaagtgcgcaatgctgttacaatgatgtctacactccactttccgggtactcaaacttctgcagcccgtattggtaggatgattggaactatgaagaatgtttttgttgtaggtgagaccaatttagataattttttacgtttgtcgcttttgtcaaggaatgaattagcagagtctttaaatattgatttaggtaaaaaatggatattgatgacttaccatccggtaactaaagaaagccgtgagaagaatcttttcgatgtaaatagtttactccatgtgctccagtcgttaggtgatgactatgaaatactagtttctaagtctaatacagatttatatggttcggatattaatcaacttttaaatgattatgtatgcaataagccttgttttcatttgtttacctcgttaggacagaagtgttatgtcagccttcttcctcagttatattgtatgataggtaattcgtccagtggagtatatgaaacgggttattggaagttgcctacgattaatataggacatcgtcaagaaggcagatatatgacatctaacattatttgttgcgataattgttctgagtctattattcagtctttaaagaaaattgaaacagacgaatttcagcaaatgttaaagtatattgataatccttatggtgatggcaatgcttccaaacgtattgtagaacagataaaaatgtattttaatgcagttaagtaatctaaaaacaccttgttttattttggattcggataagttggtatctaatgttttggaatttaaaagagctttgaacagtcgcttttcaaaccattgcattggatactcaattaagacgaattcacttccttatatgttgcacatgcttaatgagttgggatgctatgctgaagtagtatcttatacagagtatgcattagctttgcaagttggttttgagaagagccatattgtatataatggtccagctaaagataaggagacttttttagatgcaataaagaatggtgcatatgtaaatatagatacaaaacgtgaaatagaatggttgaatgatttgaacaaacagcattcttataaggtcggcattcgtgtcaatttgaatttagggaagatttcgccagaagatgctaaagagggtgaatcggatagcagatttggtttttcgtttgagaatggagaactggaagaagcaataaataagattcaattatgcaaaaatgtaaaacttggaggtttgcatctgcatcgtacttcattgactcgttctttaaatgtttataggaatatttgcaaatatgctattcggatcattaattcattaggtctagaacttgattatattgatgttggtggtggttattttggtgacaagcctaatgcacctacttataaagaatatgtggacactatctattcaagtttgttagaggaagggattgatgtttctaaaatgaaagtcatagtggaaccaggaaatgcaatagttgcttcaccttttagttttttatcggagatcattgatacaaaaaaaataggtgactctcaaattatagtaactgatggttctcgtaatgatgtggacccttttttcctgaaaaaagactattttaaatctttcatcagaaagcaagaggaaaaagtgttcattgattcacaaatggttgtaggatgtagttgtttggagtatgataagctttttacacttcaaaatcagccattactaaatgtcggtgatagaatactttaccaaaatgtcggtgcatacactatgactttatcaccattgttcattcgattttttcctagagtttatttgaaaactttaaatggttatgagataattagagaggaatggactgtcaatgatttaaagcaataacaataaactttatagttatgaataatattctgtgttgtaatgcgggccgtagagggcgtttaatgatagatatgcgtaagactatcggtgatagtggtaatgtggttgctacagataactggtcggtagccccagcaatatttttcgcaaacaagcaatatgtagttcctaaaattacacatccaaattatattcaagaagtacttggtatttgtaagaaagaagatattaaagctatttttactttaatcgaccctgaaatagatcttttagcatcaaataaaaagaagtttgaagaaattggtgttcttcctctttgtccttctaagcaaactgctgatttgtgctttgataagtacagcatgtacctgtatttaaaaaatcatggtgttaatacaccgcttactttccatgaattagatgatttcaaagctgcatacttcaaaggtgaaattcaatttcctgttttcatcaaaccacgtacaggtagtggtagtgttggagcgcataaggtcaataccatgcaggatttggaaaactattatgctgagaatgctttcgattatatcattcaggagtttatgcaaggtgattgcgatgcagatgcttatattgattattattcaaaggaagtggtttctattttttcaaaaaagaaaattgaaactcgtatcggtggggccagtaaaactatttcattcaaagaccagcgtttgtttgacttcgtgcagtcttttatgcatcttttcgactttgctggagcaattgatatggatttcttttttagagatggagagtactatctgtctgaaataaatcctcgttttggcggagcctatttgcatgcgtatggtgctggagttgatttctttaaactgatcatcaataacattaatggtgttaccaatgaagtttgcattggtgattatgatgaaggtgtgctcatgttgatgtatgatgatgtagtcataactaaggaagttgaccttttaagagattatcatgattaatcacgtttatataatagccgaagccggagtgaatcacaatggtcggttggatttggctcttcagctctgtaatgctgccaaagatgcgggagctgatgccgtgaaatttcagacatggaaaacagagaagattgttactcggaatgctgaattggctgtttatcaggagaataacatatccgataagaccaaatcacagtttaagatgttgaaagaacttgaattgagctatgataattttgaagtagtgaaaaatcattgtgatgagataggtatccagttcctttctactcctgatgaaatagatagtctagactttctttgtaattttaatttgcctttcatcaagctgggatcgggagatgttaccaatattccttttcttcgtcttgttggtagcagacatattgatgttgtcctttctacaggaatgtcgtatctcggtgatgtagagatagcatatcgcaccttgatagaagcaggagctaaaagtgtttctttacttcattgtactactaactatccatgtcccatgcatgaagtaaatcttcgggctatacaaactcttaaggatgcatttcattgttccgtaggttattcagaccatacaatgggtgtggaagtacctgttgcagctgtagcaatgggagctgaaatcatagagaaacattttacgcttgataaggaaatggacggtcctgaccacaaagcctccctcaatcccgaggaactcaaacaaatggttgtcgccatccgtcatatagaacaagctttaggtgatggcatcaaacagcctaatgagagtgagaaacaaatttcagaagtagtgctcaaacgtattgtggcggctacaccaataaaggaaggtgaggtgctctcggcggataatatgactgtgaaacgcagtaccgttggtttgaaagcttctttatgggatttggtaaacgggcgtatagctacctgcaattatgctatagacgaacctattatcatttaaaaatagacaatagtaatgaatatacttgtaataattcctgcacgtggtggaagtaaaggaatacctcacaagaatgttaaggaattaaatggaaaaccgttgatatgctatagcattgatgcggctcgtcagcttaccaccgatgagaatatttgtgtttctactgatgatgatgtcattatcaaggttgtagaggattatggcttgaaagttcattttaaacgccctgcagagttggctacagattgtgcaggaacaaatggagtactgctccatgctttggagttttatgagaaacaaggtcgtaaatatgatgtagtagttttgttgcaacccacttctccttttcgtgagactaaatcattgaaggaggctgtggctttgtatacttctgacatagatatggttgtttcggtgaaagaagcggcaactaatccatattataatagttttgaggaggatgctgaaggcttattggtcatcagcaaaggggatggtactattgaacggcgtcaggatgcacctaaggtatgggagtttaacggttctatttatgtgattaatagcactcgccttaaagaagtaggtttgtccaaactcaatagaatacgtaaatatgttatggatgatcttcattcaatagatattgatagtatgtttgactggtatatggcggaaaaggtaatcagtagtcatcttattgaaaattaatttatatgaattgctctcatattattctccaatctttctctattattgatgccattcgctgcatcaatgagattcacaatgaaccactggtgctctttgtggtagatgagaacaaaaggatgcaaggtacccttaccgatggtgatgtgcgtcgtgccttgattaaaggtatagatgtggatgctcctattagtgaggccatgcatcgtaattttaactttttacgtcgcggagtgaacgatagagtggaggatattcaccaccaacgtgatttaaggatgcgtttggtacccatacttgatgaagaaaatcatatttgcgaaatcatcaatttggaacattatgtaactaaattgccaattgatgctgtattaatggccggtggtaagggggaacgccttcgtccgttaacggagaaaactcctaagcccctaattaaggtaggtgacaagtgtatcattgattataatattgatcgtttgctttcatacggtttgaatcatatatctgtaacggttaactatcttggcgaccagattgaggaacatttccgggaggaacgcgatggggtgaagatagttactgtgcgtgaaccgaaatatctaggtaccattggcagtatcaagttcgtggaaactttttacaatgatacggtgctggtaatgaactcagatctctttacgaatattgattttgaggattttttccttcatttctgtcagcatgatgccgacatgagtgtggcagctgtgccctacgtagtgaaggtgccatacggtgtgttcaatctcgaaggacgagaaatcaagggcgttaccgagaaacctaccatcagttattatgcaaacgccggtatataccttatcaaacgcaaattgcttgaccttattcctgatgatatcttctttaatgccactgacttcatgtataaactcatagaacagggatacaaggtgattcgctatcctattagtggatattggctggatattggtcagcatgatgaattggcgagagcaagagagatggtgaaacatttgaaataaatttaaaatacaacatacaatgaaagtaatagcagtaattcctgcgcgctataagtctacgcgttttgaaggtaaaccgttagtaaacctttgtggtaaacctatgatttggtgggttcatcatcagctttgtcaagtaaaaggattgagtgaaatttatgtggcaacggatgatgaacgtattagaaaggtttgttcggattatggaattaaatatgtgatgacttcagatagtcatcccacgcatcttgatcgcttggctgaattcgccgaaaatatagagtctgatttttatattaatattaatggtgatgaacctttgatgatgcccgaatatgtagaacgacttttacctacttccgacttgaatcctgttgatttttattttgctaatgctatgactaaaataaaaaagacagtggaggtggcggacatttctcgtataaaggtggtaacggataatttaggatatgcaatgtatatggctaggactcctattccatatccaaaggccagctcggattttgactatatgaaatttgttggaatacaatgtttctcacgttctgccttgcttttctgcaaggataataaacgtggaaaaattgaaagtatagaggatattgacgaatatcgttttttggaaaacggaaaaaaaataaagtttgtagagattccagctgaaactttatctgtagatacgcaggctgatgtgaaaattgtgacagaagtcttagagcgcaggattaaaaataaggagatcgtattatgagcaaaatccaactattagattgtactttgcgtgatggagggtacatcaataatttccgattcggtaaatatgccatacggaaaattcttcaacaactgacccatgcaggtttggatatagtggaatgtggatttttggaggatggtgaatacgacgaggatacctccatttttaatgccgcagagcagatagcctccctgttacctaatgaacatggacgtaccatgtttgtagcgatggtctgttatggtgaatacgatctgagtcagctgagtccttgtactagaaattccatagatggaatacgggtcacttttcattatgatgaagtggagggtgctttggaatactgtcgggaaataaaagaaaaaggctataaggtttttgtgcaaccggtaggcacgtccagttatactgatatccagcttctccatctgatagagaaggtgaatgagttgcaaccctattccttttatctggtagacactttgggactgatgcacaagaatgatatagccagatttttttatctgatcaatactaatctggacaagtcaataaatatgggttttcattcccacaataacttacagctttccttttccaactctcaggagttttttgaatatgtaggcgaccgtgtcatttcgttggatgcttctatctatggaatgggacgaggggccggaaacctgaatacggaactgattgccaattatgttaatgaccgtgaagggcatatgtatgctatagagccattgttggaggttgttgatgaattcatcattcatattaggcagaaacatgagtgggggtatactgttccttattatttggcggctattaatggttgtcatcctaattatgcctcttatctggctcagaaacagacgcttgctgtgaaggaaatttctgccatattgcatatgattcctgtcgaaaagcgttctttatacaataaggaattggtaaataggatttatttggagtatcaatctcatgaggtggatgatacttatgtcttaaagaacttgaaagaaaaaataggtggaagaaatattatactgatggctccaggaggttcaattacagactgttatgacgaaattgtccagaaacagaattcggagaactgtctgcttatttctgtgacctttgttcctgattttatggattgtgactttactttcttggctaatgccaagcggtatgctacgacttttaatccgatgaaaaaggaggtgagtttgatttatacgtccaatattcgtgcaaatcaagaacaatctggctattgtgtcaattatgtttctttgctgaacgaagtggacattattcgtgataattcggctctgatggctttgaaccttttacagaaactgtctcctcgaaaagtttatctggcaggtatggacggttactctatgaaaaagggaaactactatcaggagcgtttgaatctgattcaggatagggattatgtcttggaaatgaataaagcgataaagcatcgcatcagtgaaataggaaaggttatggatattgaatttttaactccgtctctatatgaatgaaccggatatttgtagaagcatacatgaactgattatgcttcatttgcctgaaattctctccttacggaatacttcagagttgaaatccgatcatacctttgtttccaaaggggacaaattgtgtgaaaaactcatttttgatttcttggactccaatctgaaggattatttggttatttcagaggaaacagaaacgaatttgtcacgtttggaagaagttgagtatgtgataacggtagacccgatagacggtacggagaattttgtttcaggtctgaaggaatggggagtcggcatttctgtttataaaggaatgaggcattatcaaagtatgattatgttacccgaattgggaattcgtttatgtacaggtgatcagttttctaaaattattggttcaagaatttgtgggctgtcatcttatatgcaacctgaagattttaagaggttggaacagggctctgaatatcgtattatggggtgttgcatgtataatatgtataatgttatacgaggctgttacagacagtttttacatctgaaaggatgttattcttgggatattcttccgggtatgaatctggcactggaacaaggattggatgtggaactggaaggggaaaaatatggtggggagtttttataccccggtgttaaataccgctttaacataaaggctggataaggattatggggaagtatacttgactggtgaaaatgagtttaaagaattctctatattttgagtttgaagggtagcaactatggatatttatgggtataatataaagccaatgattgtgaaagagaattttgatatttaggacaaatatggtattttttgaaacagaaaaagtggttaatactttaaatattagagataattataataaaaaataaggatgtcaaatcaaaatctgccaaaactgtttttttttaatattgaaccttggaaagaagtctataatgataggtttctgttaaaacaattgcaagaaaagggattcccaattgagtatgtttggattggaccgttagttggtttattaagtaatgtaccttctaaaggttgtgaaactatacccaaatcttggaaagaaattcagcggattataaatctagatcgcaataaagatgctattctcatttcattaatgcctgtatttgctccttgtttgaagttgtttagaattttaagcaaagcaaaacaaaaaaatgttggctatttcaatattggaagtatgcatttgcctctccccaaaaatagaatggagcatagacttaaacttttgtttaacccgattagagtgaggtattatttcattcataggtctattcctctattgagaaaaattggttatttaaaagattttgattatgctgtgactcaaggtgtacacagtattaactctgcatctcaacttatttccgacaagacgcagaaaataacaattgtagactatgatatagagcattttaataaggtggataaaatggaaaggtataatgataggaaatatattgtgtttattgatgcttatatgcctttccatcctgattttgaactaactgccagtggacatattgatcctgaacaatattttaaatcagtaaataattacctgaaacgtgtggaggataagtatgggttacctgtagttatagctgcacatcctagtgctcaaaaatatcatgaacataactattttgacggcagacccgtattatttggaaagactgcggagttgtgtaagggttgtgcatgggctattaatcatttgagtacagctattacttttcttataatacagcacaaaccaatcaagtttatcacgactgatgaagtcgttaacaagtatggcattgcagctgagttgagttactctagttttttccaaagtccattggtaaatattgatgcagaagatgctgatatatccgtccctgtggtgtttgatagcgtgtacgatgaatttattgataaatatctttatacaaaagatgagattggaaaagcaagtgcagatttattgagtgaagctttattaaagataaaatagatgatattaaatctaaatgaactaactctggaacagagtaaattaaaggcaaagctgaaaaaaaatgtgattgccgactataatgcattgaccgaacagttaattgattataatcgtgatagtttggaatggctggtttgtaacgtaaattctcgtagtaccgttttttcttcaatgctggcagaacttgagtccttgcgattgatatcagagcttataagtagcggagaaataatagaagaaatcatagtggataatgatgagttgcgaaaaaccatttcaaatctgtatcctaagataaatgtgcatggtaagacaagttctttgaaaaataatattcgtttatggaaaaataatattcgatatggaatatggtcactctgttcatggcttagcggttcgaaagagaggcgtaataaggtgtgccgagggggaagattaactatcattgatacctttattgcaaaaaaggttgatgcctattgggatcgtttttatggaaattctgtagataaattgattgatgcccaaaaagaacaaatatatttcatgcctttgtatttgccctttgcctcaaaaaagcaattggatattattgttgccaattctaaggaaaacttgttctttatgagtgattttttactttttaaagattacctctacgcatggcgctatatggggcgttttgaaaagccagattttgcaagttatacttatcagggattcagtcttcaatggcttttgggaaaggcatacaaagagagtaatcagagttatttctactatgccattttgatggaaagagctattatgagaatgaaagaattggatgttgacatttgcttatttgtggattggtttgagaaccaaagctacgacaaatcagtatattacgcaatgcatcaatactatccagaggcaaaagttcatggatatatgggatttattgctgattcaacaatttttccacatattatagcatcgaataaagaattattttgtcatattgctccaaaagatatttatttatgtagcagttatctgctaaagttctatcaaaattataacgggtataagcatatagctcctgcactgagaaatcaagagatatatagcagtcatagaagcaccaaacctcatgataagttcacgctcttggtgccatttgcactcgataattatgatatggagtataaatacgaattgctcactgattttattaaatcttctaatgctaatattaatatacttttgaagccccatcctgatgcaaattcatcatggatggtttcctgtacaaacaaggcagggggaaagctagaagtagtaaaaggtaatgtaaactctttcttgctgaaagcagacgcaattcttgcagctaacacatctgtgatgtttgaagccttaagtttgggaatccctgttattaatctgaaagatccgctttccatcattctttttgataaaatagaagaggtgaatgaagtattgtggtatactgccaataatttggctgaactttcggatgctattgttaggatattgaatctaaatattgaggatgcaatgaccgagggctatcggttgagaaactatttctttaccaaactagagcctcagttaattttccaacttttcacttgatacctatgagcatatcatatcgcggaaaatattttaggatttacatttggcaaggattatccataattttaggttttctttcgctttttattgtgatgccttcactttctggaaataaaacactctttggtatttacagtgtttgtacgtctctgactatattcttttcgtatgctgatttaggttttatttcatcgggattgaaatatgcagcggaatattatattcgtggtgaccgaaagaatgaaattcgtacgataggttttactgcatttattatgcttagcatgtttatgctgatagctttgctatttggaataatcagcatattccctcaaattctcatgcctgaattggaaccagatagtgaaaatttttatacggcacgttatttgctgattctgttgtctgtttcctgtccggtaatcattggccaacgaattcttaatatgatttattccatacgtgtagaagattataaattacagcgtatctctgcggtaggcagtattctgaagattttatcagttttctttttttttggaagtgaaaattatttgttggtaccttattttgcattcgtgcagtttatcaacctatccgtagtattgatggcagcttttcaggtccgaaagtatcaatattcatttgtggaatttcttaaagctatccgttttgaccgtattatctttgataaagaaaagggcttgacgggagcttcatttatatctatactttcttgggtgttgttctatgaatttgatcaaatcgcgatttcaaattttgttggtctggaggcagtagcagtttatggcatagctttttctgcattgacctttgtacgaacctttgtgtcattactttattcaccttattcatcgcgatataatcatttgattggtgaaaatgacagggtaggactgatgaaatttgtgaatcggatgttattaatgctctcgccaatggtagttctgcccattgttggattgtctatgctgagtgaaccatttattataagttgggttggattcaattatgaggaatccagttctattttatcacttttggtgttttgtttctttccttgctttctctcaaaccctagttcttcttattttattgcaattgaaaaaactactttacttaataggtttaatatatttcaacctatactatactggttattaattttttttactgttggtaaatggggcgtattttcgttcgctatatctaaaggattgattcctatatttttgggtattctttattggtattcattatacagagattttgcaaagaatgctggtcagatagtttcactattcctaattttgaaaactttgtttttacctttaattgtactattagtattaagtactcttgtaaagccttatatggcttatgaatataataagatttccctttgttataatttattggttatgggattgattgttttaatatcaattctagtatcagtgtgttgtaatagagaaatgtattcattggtgaagtcaattattagacgttgaatagaaaggaattatggaaaacgaaaccatttagagattatgataatatcaaaaatgaaaaaaatgtttagactattgtttacgtctgaaatcagtagctttatttctccaagtattgatatatcagaaaaacagtcagactatgaagcactgatagaggctcctaatcttgattatgttaatcgctatgaaaaagaactaagccaatttcttggaggagggcatgtcgtgactttcgcatcaggacgtatgtcattctattctttattaaaaagctggggaataagagaaggcgatgaagttgctcttacaggatttacttgtgctgttatggctaatgctgttttgcgaactggagcaactccaatttatgtggatatcgacaaggataccttaggaatgtctgcagaatctttagtgtccaaaattacgaatcggacaaaagtagttgtggctcagcattcttttggaattccatgtaagattgataaaataaaggagattgctaaatctcatagttgctatttagtggaagattgtgcgttgacctttggttcaaaatataaaagtattatagttggcaattatggtgatgctgcaatattttcaacagatcataccaaacctcttaatacacttataggaggctttgtttatactaatgatatagacatagctacatctattcgggcaatgcgtgatgattgtggggatttaagtaacgaacatcagcgaatgatcttaaagacttatattgatgaacaccgcatagaaactgtaaatcataaaatatacataatgcggaactataaaaaggctttgatgaataagctacatattcataatgaaatatctccttatttggagttggaaacatctgccaaaatcgcaataaacccttattacagttatcctgctaaactaccttctgttttggcaaagattggattacatgttcttgaacaatataaagctaatattcatcaaaggcagagttggcttaaagaaattttacaggttgtagaaaaaaaagaagatatgcctgcagcttattatgatactggttgtgacattattcctttgcgtattgcttattcaactcatttcgctcttactgtattctcatacattgatgattggatttggtttaaaactccgattgttgcaacaaaagaaaatatatgtgactttggatatcattggggaggatgcccagttgcggaaaaaataggaaaatcgattatgaatctaccggttattatagattcaaaacaacaaaatatctttttgcggaatataaaaaaaacatatagttatggcatttagtaatatttataagaataagaaggttattattactggtaatactgggtttaaagggacttggctgtctacatggcttaaaatgatgggagctgaggtttatggatattcgattggtgtgccgacaactccatcgatgtttgatacacttcatcttgaagataagatatgtcaacactatggtgatattagaaacaaaagggaatttaatgattttgtgcaggaagtgaaacctgattttttgattcatcttgccgcacaagctttggtcttgacaagttatcgcgaaccatttgaaacaatgactactaacattgtgggtacagctgttgtatgtgaagctgtcatgaacattgattggaattgtacttgtgttctaattacttctgataaagcgtatgataatgtagagtggatttgggggtatcgtgaaacagatggtattggaggtaaggatatatattctggatctaaaggtgctgccgaacttgtcattaagagttattggcattcatttatcaagaaaatgccaaacattaagtttggtgtggctagagctggtaacgttatcggtggcggtgattgggcaaaagatagaattattgtagattgtgtgaaagctttttcagaaggaaagactgtagaaatcagaagtccaaaggcgactcgtccttggcaacatgttcttgagccattaagtggatatctgacgttggcgcaatatttatgtgaaggcaaatgcgaaaatggggaatcttacaactttggtccacgtgcagaacagacaaaaaccgtatttgaactgtttcaagatcttgctactttatggggattggataagaacaaagctgcaaaactcacaggcaatgtaccttttgaggaagctacattgcttaagctgaactgtgataaggccttggcttatttacattggcattcaaccttgcattatgacgaatgtgtgaattttattgctgaatggtatcgtgcattctatgtagagcaggctaaggatatgtttgctttgacagaaaaacaaatcaatgcatatatggaagctgcaaaaaaacagaatcttgattgggcaaaataattggaaataatggacaatatcacaattgacggagttttgctgactcccttaaaacagataactcatcccaaaggggatgtatttcatgcaatgaaatgtgttgaccctggatttgaaggatttggtgaagtttatttctcaagtgttttacaaggtttggtaaaggcatggaaacgtcattctagaatgacattaaacctagtatgtattgtaggaaagatacatttcgttttatatgatgggcgtgagaactcttctacatttggaaagtacatggaggtgatattgtcacctgaattacctgaattgtatcgaaggatcacaataccggctggagtatggatgggcttcgttggaataggtgaaggtaaaagcattcttctaaatgtagccaatattcctcatgatcctctagagcaggtaaacattccaatagaagagagtgatataaagtttgatttcaacaaaattagcagatctatatgaaggtagttcttttagcaggcggttttggctcgcgtattagtgaagagagccaatttaagccaaagcccatgattgaaatttgcggtatgcccattctttggcatataatgaaggaatatgcatattatggatataatgaattcataatttgtgctggatacaaacaggaatatattaaggaatggtttgcaaactattttctttacaattccgatgttagcttcaacttccgtaacggtaagaatgaaataactgtacatcattcaaatcttgaaccttggaaagtaacgatagttgatacaggatataacacattgaccggaggccgtatcaaacgtataaaggaatatgttaacaatgaaacctttatgatgacatatggtgatggtgtgtgtgatgttgacatcaataagcttgtggcatttcataaaaagcatggtaaaatagcaactcttactgctgttattcaagcacaagacaagggggttttaaatattgatgaaaataattccattcgttcatttcgtgagaagaatatcaatgatggtgtacctattaatgccggatatatggtgttggaacctagagtgttcgattatatagaaggagatcaaaccatatttgaaaaagaaccattgaataagttggctaccgaaggtgaactaatgtcttatacacataaggggttctggcaatgtatggataatatacgtgaaaaaaatctattggaacagttgcttattgatggagttgctccatggaaaaaatgggaaagagaaataccgataataaaatgatgatgtttatgagaaatattagattgtccaaatcttgcattggtaaggaagaaatagatgccgtaacagacgttcttcatagagagtatttgggtatgggacaggatgtacataaatttgaagatgatttaaaagatttctttgggcgtgacgtgacacttgtaaatactggtacggcagctttgcatcttgcagtacaaggtgtaggaataaaagatggagatgaagtacttgtacagtctcttacatatgtggcttgttttcaagctataagagctacaggtgggatacctgtggcgtgcgatgtggatgatgatacgcttactatcgatttggatgatgccgaacgtaaactgactccaaaaacgaaggctataatgcctgtacattatgctggacaatgtggtaatcttgatgctatatatgaatttgcaaaaaagcataatctacgagtaatagaagatgcatcacatgcatttggcacttattataaaggtcggttaataggatcttttggtgatgtggtgtgtataagtatggatggtatcaagaatataacatctggtgaaggagggatgataattactgaggaccttgatgtacagaaaataattaaggatgctcgccttttgagtgtacagaatgataccgatagtagattcaagggtacaagaacatgggtgtttgatgtcaatcaaccggggtggcgttatcatatgagtaatatcatggccgcaataggttatactcagctgaagaaatttcctaagtttaaagaaatacgtcaaaggctggcaaaaatttatcagcaagaacttgataatgtaaagggaataaaaattataccctgtaattataatgaagtggttcctcatatctttgttattagaataacttgtggcaagagggatattgtgaaacaatgtttgaatgacaatggggtggcaacaggcatacattatcgccccaaccatttgcttacattgtttacaggtaatcaaaataatacgactcttaagcatacggacgagatttacgaacaactcatcactcttccattacatgccgatatggtagaggatgacgtatattatatttgtggactaattaaaaagagtatatgatggaggataaacctctagtaagtataattgttaattgctataatggtgaaaagtatcttagggaaacaatagatagtatattgaaccaaacatatcataattatgaagtgatattttgggataaccagtctactgattcgacagcatcaataattaagtcgtataaaaatgaacggtttaatttctattatgctccaaaacatacaactttaggagaagctagaaatttagctttagataagataaaagggcagtttcttacatttcttgatagtgatgatgtttgggagcgtgattttttggaaagagctgtaggtgtcttatctatttataaaaataaattttcattttattatagtaattattattcttggattgatggtgaagaacttgttgaatataacacggaaaagaactcaggaaaccgtacttttaaagacttattgtcaaagtacatggttggtatgtctgctgctgtcattaatgtgaacagcatgaaaattgatgatataaagtttgattttaaatatcagttggtagaggattatgatttttttttgagattgatatataagaacgatgcatattatgatgctcgtccgttgatgaaatatcggatgcattcagactctttgacggtgacacagaaggcaggatggggaaaagaatttatgtgtttatatacagatttaatatataatttgttgagtgtggacgaaatccaacaatattctgaagaattgaaatggcttaaagttaggagtgttaatgcagatgtcgaatatttaattttacatgggaagaaattagctgttttacgtatgattattcaaaatttgcgattatcgttcaaattattaattcactttgcatatgttgttttaccgttttctttatatcgaagatttatatatatatttagaaaaaaaagatatcattattagtctatttagctttgacttttttttctacctttatataacgcttgttaagtaatcaagattgtaagccgttaaaaaatggatattgattgaaacctctatcttcgctgcgaacaaaaaaattaggatttatgtatagcagtgaagatcttgaaaggttttactttcaataccagaccgaggctttgcctcatggagaatccctccaatcattttgtgttaagcacaaagttccttataacatctttcagaaatggttaaaggatatccggaaaaaaatagttgaagtccagattaatggtgttcctgaaataggtcatgaggaaaaatccaagactagtgatcaatctcaccctatattacagagtaaaaatgatacccctgttcgtatttgggttgacattcgtataagcaatggcttatatttgtcccaaaagaatttaagctatccggattgggttcggatggtagagaagctggaggggttatgttgagtgttaccggtttcaatcatttttattgtatccgtgattttaccgatatgcgttgtaaacacagccgtgtgttgtctgtcattcgtgaacggcttcaccgtgagcccaatgatggagacgtctttatagtcatgtctcgaaatcgcagaatagtccgtatgttttcatttgataatcgttcatatagtctgttcgaaaagaagtttgttgcaggttatcagttcatgaaagtggagcggaacggggcagatactgtttatcggattgactggaaagacgtggctttgatccttgaaatcccgataactaaaatgttaaaaatcagatgattaaattaaatatacacttgtggttttatgattattttactgccttttgtgctgtaaataaaaggtttaagtatgatcgaactgcaagatatagttaaaacaaaaagagagttgttgggtagggcaacctactcacgcaaccctataattatagtgcaggtatggcagaggatcagaaagagcggtacatacaataccttgccgaacagaatcaggatttaaggttgacaagtgatgccatgaagcttgttttggaggattttatggctcagatgaaggatctgaaggctcaggtgtcctctatggaatcgaaacatgctgaccttgagaatcggttgtcagaagagcataaacttcgcaaatcagctgaacgtaagattaaatcacttcaggaaagacttgattatgcccatcaggaacgttttggtgatcgacgtcaaaagatcaaatctaaagctaagacaggtgattcagaccgtaacaaggagaaggatgattatgatggaaccgatgatacgcttcgcacggattcggttgatcatgtccaatcaccgggggttaaagagccttccgggaaagaacgtgatttgtccaatcgtcctgacggttataaaacgatgggagtagccggagaggcgacagagcatccttctgatttgacaaaggctcccggtcgcctcattgaaagaagaatggtacgggtgttcagtttccgtactttccttgcggaagaatgttttgagatggttcattatgcagagcttggtaaaaagcccaggtggggttatttcccttctgaaggccatcctgaggtgatgactagattcgagggtactaaagccactcctgaatttctgtaggctattgcctacgaagtttatgtaaagaatgtgacttttggtcttcttcaccgatggctgacagatatgggcatgaccatttctaaaaatacgttgcgcaactggcttacgaaggacaagacatacctggacgaactggtctgtgtattgaagtctatagctttggaaaaagactcgatagtgaactgcgatgagacctggtgtaaagtgcgtaaatatgatcactataagaagtgctacattggggttctagtcaacaaggctcggaaaacagccattttcttctatgagaatggctcgtgtggtcgtgatgtacttacagactttttgggcgatgcagaattgaagagtattatgtccgacggatacaatgcttatgtatttatcggcaatgagctgaaattaggccggtttaaagatactgtacaccaagtttgtatgtctcatgccaaaaacaagtttgtcaaggcttccaatcagggtggtgaaccgactgcagaacgcttttccgaaattttaaaggagttctttatgagggatcgtgaatacgatgatgccggattaactccaaaagaaaggtttcaagaaaggcaaagcttggaaactaaggaactcctgatagagctgcgtagtttgttagatagtgaacagtcaaaggattcagaatttagaagccggtattataaagaagctctcaattatctgaaccggttcaggaaagagatctttgcttact

SEQ ID NO: 622 - DNA, 37834 bp, Phocaeicola vulgatus
  source 1..37834: mol_type = genomic DNA
tagttaattatttgttaaacaagctgattaatttgttagttagattattaattcatatattgcgaaaaatttaaactcgtaacgttatgggaaaaatattaccgggtatattcgtagcattcgagaacccaaaaggtggaacaggtaaatcaacattaacagccttgttcgcaggatatgtacatgagagccacgagcagacaggtttaaccattggcgttgtcgatatagacgatgcgcaaaatacaatgggggagttaagagctttcgatgaagcacaacaggaagaggatataaaagacgagtatgaagtaatgagtatatcttcatcagacttcattaacagcatagaatttctcaaagaaagtttcgatataatagtggttgactttccgggaaacttgaaacaggcaggagtagtagaaaccctaatgatgatggatgtggtcattataccttttgctccttcaaaaatcgaagtattgcacactgtaaagttctacaattactacaaggaaaatatcttatctaaacgagaaagtctaggttacaaaacaatagtaaaaggattgcctaacaaggtaacacctaatttgcttgaatataaagagcttatagcaaacaaagacaatttacctttcgagctactgaacaatcatatcaaggaaagcaaagttaattaccaaagaaacctttctacgataataaacaactataatcacacctgtgatgatttcggagaagaaatgatacaattattaatcaattacgttaaaaaatgaaattatggctgaagaaaagaaaaatacaggaaaacccaaaacatcaatgttcgcattggtacaggctggtaaagaagaagctaagaaagttcaaagtataaaatctgtttcatcacaacagacttcagaagagaaaattccggaagtacaaccagcagccagcaccacagaaccagctaaagttgttgctccagtacaagaagaagaaatcattcaggaaaatgagaatatgacagaagaaccttcagaatttcccgaatcatcttttcctaaaggtctttctttgcttttcgctaaaagagagataatagacacggaaacgataaagatacctagagagttccatcaagaacttaaaatactatctacaatgtcaaaagttccaatgatgcaaatgctaggaaatctgcttgaagcatttttggaagaaaataagaaagaaatagcaagctataaacgcaaattcataaacggtactttaggaaaaaaatagccataaggaaaggttgttttacctttccttatcatattaattagtaaatcattgacaatagaagacatgtaaataatcaactaaaaatatatatatgggaataataaaagtgcaatgctcttgcggtatgctatggctaagtgaaacacttggcggttatgataccatttgcgaccatgacggaaagatttgcggtgcggtcaactaccaagatgaacagttccaaatcattcagccggaagaatgcaagaagcacaaaagggacacaatgaaagaactcaaaggggctttgcaacaagttaaaatggaaatagggtaggggatttcctaccttactttccattaagagataaccggttactggttttgttttggttcaaccccaacagaacgcaaatatttatacaaagttctcgtggagatattgagaattgaagcgatctcttttgctgaatagaagggatcttttgacagatacattttctttgcctgctcggctttctttttcgctaaatcatttaagccgggctttcttcctcctgttcttccctcacgttttgcgacttcccaacctgcaaccgttctttctgtacgtaaaacctgatcgatttctgccaacattgaaaatatcgggatcaaaagtttcccggaaggagtggacgtatcgatattatgcgttacatcgacaagatgcgctcccttattcattattagatctacattcgtccggatttccttcatggatctgcctaaacgatccaacgaccagacatataagatatccccagttctaagatcttctaatgcccggattaattcaggacgttctttaaacgctgattttttttcttgataaattttctcacaaccagccttttctaatgcttccaattgcaaagctggattctgatccggagtcgatacacgtgcatatcctatcttcattataatacgaggattttaattcttcattaaacatttattgaggatttcattttatactaatttacattatttagccaatctagagcctcctgcaacgtataggcatattccgcatgataaatatatgaaacttcatcaccttgcctatattcacggtcattgtctgtttctcctagaatgtactccatgtttggagttcctaatcgatgcacacctatacaataggtcagattttccactcgctggctttttttagttgctaaaagaaatatcctttctgtatcaattgccatattattactcctttcttattatttgaaattatcgcaaatggcttatatttaaccaccatccatcagtttctagtacattttccctactattattatcctgtataactatatgatcatcatataatccatatgtatcactacagtctgcacaagtgaagcctatggaaacattgtacttcataaacaactgaagtaaatctttcttcaaatctttaatatcatcatcagtcatatctattatgcttttatcattttactttttgtaaaggtagtaaaataatttagtaaaacaataaagtaaaatgtgttttttcttgatacatgccaaaaaaaacattttacttaacgtataccaaaagtaaaatagctgttgtttctctttctcacctctgattaaatgagattggagaattattactttcctcaaaatatgacaatttgtcatgcccgatagtatttttccgaaagtatgatgatataaactgaaggaaaaatatcatttttccggtcatttcttctgtccccctttgggggattataggggggttaggtttttaggttatattaagaaatatggtgtagccttttacacagctgggaaaaatcacttttcattaattagctaaaaatcaacactttaattttttgcgatatctttaatatggtgtagtattttacacagctaaattgaaaagtgtagtgttttacacagctaaattttcaaaagtgtagcattctacacagctggaaacctaaaagtgtagtgttttacacagctggaaacccaaaagtgtagcattctacacagctggaaacctaaaagtgtagtgttttacacagctggaaatgttaatagaattgaaaagtgtagtgttttacacagctagataatcttttccggttcaggtgtcacagtaggtggatttttaactataaattcctttggctcacgtgtcacagtcggggcattactagttaatccaaactcttcaggggtttttccaaatacccgaaagaaattttccctatatacttcctctttcagtgctttgttttgtggagaattagcccatgccaaataatcttcatacaagtttcgatcagattttatatcttcaactttgttaacccgatctctgcctaccgcacaattaggaaaagctaaaccagcgtatctccataacagatcactatagaatctttgagtaaacatagcggtatagcgttcatcaaaataatcaagcgtttcttgagaaaattcaaaatctaccgtatatgcccatttatcattagcacctttaacgtacttaaattgaaagttggtaaatctcaagtgttcatttatccccttcaaaacttttgttacatttcttttcctttccttattctcttcaaaattgaggttgaacaacttagccaactgatcaacggttaatctgtaactaggtgcatctcctgttttgattttatacttaataagatatatcattttcgatagttccaaatagaaatatcgatatttggaaggtaactctctataatcctgactttcaattagattatagagagtataaacagaatcctttatcagattattcagagtagcactatataatcttttcgttcctttcttggttttaaaatttgtccggatttcaaatttggtaaggatctgaataaatatatatgaagtgccttcgcttgtagaaacaggataagacatattttctaagccaagtttataaagggcggcttcaaaaacggtttctatggggtggcttatttcctccccgtttatatccttacagatataatgaggtgagcgttttccaaaaagatccttcagctgttccttagatagttttctttgaagatttgtccgattataacccattttattacaaaaatcctctattgagaaccatgattcaccaaatagatctctaatatgattcccacaaaggtaaattataatatctagcattacactaccgccagaatcatataagcgctcaattagcccagaattgtaactttcacttaataggcgtggaacccggcttaattctttttccataataaattatcatttatcctttttccgtaactctgactgtacttttttatcgtatgcttcccctcttgatactagatattcaaatttaactgtatcatctacaatcttaacgtggaaaataaagaatgctctataatctcctatacgaatccgatatactgatttataggcaatgagtttcttgcaattagtaatttcatcaataccattagcattcttcacttcccggatcatatcaaggacagaagacagaactttccctgataatttatctactgcctttaaaaatggctttgaatattctacattcatgataaaccatatttctgttcaaaggctttttgttcggcttcactaaccatgacatgcccttcaggttgattcttggaaagaaacgtataagttgttatatcttctaaatcattagcagcggagatcaataagccttccataaaggctttagctgatttcccttccttagctgcttgtacggatagcacagttataacgtcttccggcagatccaacagtttctttctcttatcaatttgggtgtttgagattgttgttcccataatcatttatgttttaaattaataatctatatctttgcatgaattaatcgcccaacaaagatatataacatatataacatatacaatatatataacatatataagttatataacattcgatttttttgatacattgaactatatatacattttttaatattaaagaaatggataaactgactttggaagattctttccgcgagcttattaaacaaagaaagtggtatgtaaattccctacgttcacctattcaggcgaaatatgataaagcgacctttcaaaaagggggcaaagttcctgaagaacgaatccgggactatttagctgccgctggttggaaatgtgttcagcctgaattatgggagaaaacataaaaattacaatatttaaccacaaaatttttgctgttttaaatatttatttgaattttgcattcaatataacgaacctttttttaaactgaagttttctttcctttttcaagatctatttgctacttcaaaaattccgctttctttccttgcaattttgactctatcacgcaaagtatctataataggaatattccgatcaatcccatacatatataaaataggatcggaagcatcacctgatataactttcactgtcttgttgccaaatactaattgcaagaaattttgtttttctgaataatcaatcactctatataattctaaatgttcctctcgtcttgagattataccatgcctgaaaatcagttcatccttagtaataatccactttgtagcaaacagcgtgtctatatatgtgtaacacaacataatccaaacgactaaaaacagcaccattaacgcatagtgtacaggcatttctaaatcccaataaatagcagagaacgggagtaaagatgcgacaacaattatcacaaaatactttgaaacccaataacctagtttgggcttcaatgttatagccgtttggttatccataatctagttctttatattagtatattgtatagactttgtattattctctgaatccggaacggaaactgtattttgatagatctcttttccatcctgatacactgtcattttcaatatagcaccggatttacttttgctaagaataatcccttgagcagaaataaccttcacttctttagaggttatataaactttccgtccgctaaaatactccgttacagaactttgttttaggtctgtgttacttgtttcatctataattgatacgttatccggattaataataatagcttcagctgtataatcatcccctgaagcctctaatactaccttatatacagcagatgtattattaaaaacaggatcattatccgatccaccacaagaaactaatactagagtagcacataacgcaaacaaatgcagcttaatttttttcatcatctttatatattttaaattcagatccatgtgtatgtaaagtaaacaaacccttatatttttctttctagaaattttctctgctatcaaaatcatagctattgccgttgccatcaataagcccaaattgatctgtttctacaataaacaaatcgctcgtttctgataacttgctaaaatctttaaaaaactgaaccttcatatttttcttatttagtcgtagctttcatccttccccagcacgttttcatatcgggagcgagtaaaaactcgccaactctctcctgcctagcctttaaactaggtggaacaattgcatacttgcatttcaatagtttggctaacacctccgtactatctctatccttatactccattttctttttctctatccattttaaattatctttagccttggtgtaatcagagaaaagcggttttaccaaagcacgaggattctccgctctttctatcatctgtacctgttgagcagctttactatccaaatacaataagctgtcggaaactgtaacatctttttcgtcaagcaactctatcaattcaaacttaagatcagtccaagtaccgttttcatcggtttgaagccaatccgctattgccttttcatattcagttgatccacacgaagataaggcaaataataaaactatcaatatcctacttttcatatattattttttttatattttcacaaaaatacctcttttattccttccatgccttatgattatgatctttcggcatgtttttttccttatttttattgtccgtttctgtcttattctttacatcttccaagatcgcatttacttttgaaatgattgaaagataatgttgactaactatttcttccattatatcatactctaattcttctttgccatctcccaaatttacaggtttggaaaaagccggaatatccttatctataaacttacacatattaaattgtgtattaaaataaggtggttttccgccagcgacctttccgatgaagtgaccaacactttgtccggcaacttcacgagcctttactactttctccttttgcagagattcggtcatgcttccagtaccggattcttgatgtgagaacgattcctgtgcttctttcgtttctcccaaaagattttctagatcctttgctgtcttttcgttaccggtcattccataggcttggctaccacaagaagatcgcaggatatttgcacttttctctccataatcccggattgcttgattaaagtcctgtacggctaagattgtagctacattgtgtttacgtgctgtacctataaatacatctataccttgcaaatttaccgttggaaattcatccaccataaaaacgctcttttgtttgccgggattattcatttgcgacatgacaacgctagcgatacaactaacaggaggagatacagcttctttaattgaaggagcattgcctatacacaatagtgtaggatgatccggattagttatatctagtgaatattcttcttccggaagtggtgatagaacccaaaagatgtatttattgttaagcaaaacaagcggagtctgtgcggaagataccgcaccagcggtctgctgctgtgcgcctaaacgccatgcggttaacatggaagacatgtttagcgcaatttccgcatcctcagagagccatttaaagaccagatcactatctgataatgcaaaagcgattacatggggtaaagttcctattccctttgctcgttctttgtaacatttataagcaattgaatatacatagttaatcgcattgttcgcccagaaatcagttttttccttccatgaactttcaaggtttttcattaaggtagtagcgatattacgaataaacaaggattcgcttcctttagggacatatttttccgaaagtacattaacacgaaccgtccgggacatgtctacaaaatttatgaaagcaaaggctggtgtaggtacattttttctcttaaaatattctatactaccgtatgcgatccgggacaaaataggtgaacccggtttactaggatctccttcccaatcatatacaaatccggcatagttacgctctgcacattgatagatgatgcctttaatccagctttccgattttccagatcccggaccaccgtcaatataaagattttgctgtggcttatggattctaagatttccttctactgtttcaaaatcaaaataaaactctgatttttcatgtgatacaccaaagatagatttatcagataccacatgccgtttaaggtaaaaaccggctgtttggataactagtattgtaaatcctataaatactatcggaaaaactaataaattgtaccatgatagaacattactgaagcctaatattagggctattgctaagattaatgtagtggcagtatatacatatttcaaggattcatctcttctcttttgtacagggaataggaaagccaacccagctaataatactacatataggaatcgaaacataatagctttgcgtaaaaactttcccaactgcaataatacagctgggcttggtgaacaaagatcattcaccaaaacccactgaaagattatcacacccccgattattacggaaagcaatataaagacaaatgataattccttctttgctggttccattattctttattcttgctagagagtaattgaaccttatctacactcatagttactgaagggactgtatcaccagtatcacgcttaaagataccgacagtgatttccccatacacatgaaccatagttcctgtttttaaaaactccgcaacctttgtttcgtaatttaagaaacaacagatccacaacgttttttcttcgtttccctctttatatttagtggaaacattgaatgaataacctttctgtgttttcttggcatctgatccaagataacccgtaacatgacctataaacatacgctaaaaatttaaagataattgtttgacttcatttttattttttgattcggaaaattgtagggaaggagtaggatcatccaactttatattaaatatattctgtgcggcaatatatattttcggatctgcatcctttaacgcatcaagttcctttgcagacagtttatatccctgctcctttaggttaaccaattccttaaacgaaccggctagcgcagcagctagagctatattaaaagctggtgataatttttcatcattccgggtttcagaaaaatccttgctatcatctacttttttattctctatatgcttgcattcttcctgttgcttttcctgttcttccttcttcaataactcatacttgcagacttcattcaaaatcatagtgctagccttacctacatcaactaatacggaatagaggaatttaggttcttttttgatcgctccgagccagttttttaaatactgtgcgttttcttcccggactccggaaacgatacctagagaacggcaagaaacagcagcggtaaattctgcgattaattcttcttttgcatatttgggatcaccaaacatgtttttcatttcacgtcctaaacgggtatctataccggttgaatgtgccatctcatgtaacaatgtgctataaaatccttctcctgtatagaattgacctttaaggggtaaatatatcttgtcctctgaaggacgaaaaaaagccttgtcagagaaagaagaaataataggacataaccatgtaccgtgttttatcatgtgatccaactctggcgatgaaaacattccctgctcatctttcaatttaggacaactaaatttatccttcaatgccttccattgttccggatatacttccgcaaagtttgtttgatcaacattgaacacgtgataaggtttagtataaggaataacggtatattctttctgctcttccttagtcaaagccttataatcatccatcgaaattttattccccttatcgtctttaatcataaaattccaaaataggacaggaaaagccgatgctcctttgtttatgtgaagcccttgtttctttgcttgcggaaaagtcatatatacaggtgtctggaaactacgttcctcttgaagaagaaaaagcatgaaggaattgattccattataaacacgcccatcaatattttgtggtaatccatatcctgttgttgtaaaccaaggtttatgccaatccgcatcgacttccgtaagtttcttaaccataagatccgcaaatttttgcagagccttatcatttgcctgaccatccatgacttattgataaaggtgttcattttcatattttagcaaccattcagcagcgttttccgcattcgggctaactccttcagcttgcatatccgcaacgtagagagccgctaaatcttcttgagctaataaaaattcaagatcgtcaatctctccagtctgattcttttctaccaatttgttgtaatcttccatgatatttatttttaagtgataacatttttactttcggaaaaatctattaattataaatcggcaaacattttatttaccgtattggcgagaggacgctttagatctttttctgcactttgttgaccttgtgctagcttaacatctccgagcgtattagcagagcctttcagattaaatatcttctgaacggctatcatcgtattgccagatgcagtttcattcaaagactgaatcaactctttggaaggttgatagccttgttccttcagttgtgacatctttacaaaatcgcctttctctactgcttctttaaattctttatctagttccggagaaaccttagcactagcaggatcagcattaagctctacctttgcttctttggattcttcctttgcttgtgttacttcttccgctttttgcacttcaggtttcatcccaaatagtttttctataacgatagcttgcgtctgatcaatctttgtatcttgtcccaaacctctaataacttcctctgaaggcttgtaaccttcctctttcaaactagctattttttcatagtcattcttgacaacggcttctcttaactccttgtcaagatctcgatcaggaacaggatccttacccgttactttctcctgatattgttcccggatcttctcgactttaaagccttcttctttcaattccttttcagttgtacctttggcgattattccttctttttctaacatatccccagcctttaacctaatgcgtgcttcaagatcataattatagtttttatccggattttcatctttcagataagataggtattccttatgttctgtggcaaaatggctgtttattaattgctcataccttttatccttcaactcgtctatatcgatttttccggtacgctgcatatcctttagcttatcattaagatactctttatcctttgccatttctcttgcctgtaaaatctgctgtgcctttgtttccgatattttctggatgtttgagaaagcatatcctttcttatccggaagcatagctatatctgtaattatgtaaccttcaggagtgtggatcattttgttatctaaagaatgaccattcgctaaaagatacttatctgctgcggtcaattcgtaatctccaattttagcaggaacagacaattctttttccgaacgtaccaccacagcgttgagatccttatcgacctgaagaagtatatctcctttttttgttgacaagactatcacattgccatcaagtagatcttgcttctgttgcttcgataatttctttccgtaaatgcgatccggtatggttaacgcttccttcctatatataatagaagtaccgtgttcatgcaaccgaactttagctggtttaccattgatatccattaatccggataatacacccttctctaactttgtgcctttcccgtctaacgagtaaccattttgcaaagcatactcatatagttcttttccggtataacagattttatttttatgatcgatcacagtaaaacgatctttggcatcattttttagatcaccccagttaacaatatcaaccccttcattttttaatacgcttttatagtcgggagataaagcctgatcccgattaaagaactggcaaacacgatccatagaagccttttccgcagataaatccggttctcgctttgtgtgtgaacgtatcttatccatatcgatacgaaatacttcgtcattccgggtaaaaagcaaagaacccttgttataggcttctttgtaacctaaactttccgcaatcgccctaaattgcccgacattattatattgatattctgttagaacctcttgtagcttcatgacaattattttaataattcagcggacaatatatattcattcaatatagataatttcatatgccttcccccacctctttcaaacatttcgatctcaaaaaccttatcatccgggatagtgaacttattgaatgctaggacaaagcgattttggcttttgcccaatatctttttatcaaagtctttttgttctaccggatcatacggaacttcctgctggatagagttcttaaccttcttctgatcacgaaggaagcatttaataaaatcaacgtcataatctatatttgagaagttttttatatcaaatacaaaaaacatgaaatcatcttttacatataggtttgcaagggacatctcaaacttattttttataactcccaagctgaagatattacgctttttatagtgcagtttattgataagattatccatctctatgctatttacatcaatgtgtgcaatatatttgcgaccatcgtcaaagttgtaagagtaagtaagagcatggtctttaaacaaggtaatttcataggtattcagatctttatcgataacaaacagattagaaggttcaaaggcatcaaaagttgtaccaactttaaccatattattataatactcaaccccgaaaacttcttcatttccttgtttcagatataacacatctgctggaaaaaacatttctgtagtattgttattattgactattacgttataacaacgtgatctatccacatcaccggcatatacgatatttccgcagtgatccgtcattcccggtaacagataggatattttataagaatagacattcccgtttgtacaaactatgataaggtttgtcgttcctgaaaaatcttcttcctgtgccgttatgcggacaacattaggaacattatccacccgttccacttttacataatcttcacgaccatacgaaatgtcacttacttgtgcaggaagtactatatgtttcgttttatcaaacgaaacataaattgtttgggagtccagttcttttttttcctgtgcagaaatggagaatggaacacaaaacatgattaatataaaaagcaatgttttcattttacaaaaccaataaaaatatttataatccaaagcagaacgaaacaagatattaaactatacatcagtactttcatttctgctatctttttccctttagagcgttctataaagaacctataagccaaaaatacagtagctacagctaccataaaattaagtatatcaattatcattataatgcttcaattagttgggttaaaggattctttttctttggttcattctgctgcatctgcatttctctatacagacgttctatttcagcttcttcttcctctctcttttttctgtcttcattagtttcttccttgatatacatattatagttagcttttaaatgaacctttacttgagaaaggctttgatttaaaatttgtctagtaacctgtgtagtggctgtgatcgcactagttacctcacttgttactgtgccaatagaagaaatcggaagctgcacgccttgaagcaagccctgttccatttttcgagcagcttcagctttcatgttattgggtaaattcaatccctcaatcgcatcagaatcataaatagtaaaagcgacaggacttatatatttcccatatcgtatgttctctaccgtaattttcaaacgagtagagccgacactagcatttccgtagaagatcgtatttgcagggatctcaacgccaccaacccataaaggctctaacaagcgcatccggacagcacttccactaacaatggtctgatctccataaatagcagctttgataagattgactttttggtcaatagtaaactgtgaccggcgacgccgttttccattttccactataaaagtcggctttgaagctttctcaactttaggaacagaatcatttactttcggaaaaatattctcttgagatttctctatatcttttcctgatgcttgatcctgatatttctttctcatttcatcccggaatcttgcattttcttctagctctttgcgtattctttcctctttctttgcttccttgactatctgattaaaggtttcttgatcctcaatatcatttagttgttggcgcattttatcagaaaatgcactgttagatttttttcctcgctccttgtattcgctagtaacttcgtccaatggatctttcttcattttttcaatacgagctttcattttctcgttgtattcgtcttcggatgtctgcatttcaaaatagaaatcgcttccttttacttgtgatttttccaattcacgtttcttacgagcagcttcttcttgttcacgtttataagcatctaccttattagcgatcttcttttctccttctgtgtccggttcaagaaaagcctgattcacttcttctgtattggatgctgattcagccggtttttcttttttaccaaagaaaactattacaaacagtacgcccaaaagcagaggtactaacattaacaatttgtttttgtccttcaacgcttctcttaaaaagtttcccatagctccattattttaatttttcttcatctgttatttctcgtggttccgaatatcgaacgtcccagctttcgattttaacaccgtgagagttttcacgtgatcgagatacatcatatagagtaaagttcacagaaatatcacgtgctacgctccccctagcacgatagccggtttgcgtaaacagtatatccccggatatcggaactgtttgcatattgatatgtatatccttgattataacgccatagcgtatatttttctgaatcaaagaattaagcatattaatatcgttatattcgttgtaaagctcttttcctcgattaccaatcaaattaagagctaatgttacgttattctcataagtgctttcatcgaaggagtaccacagcgaaacaaatgttttgatatgattttcatattcatactttcgcatcgctgcggattcaatggctgcaacatcgtaaacctgtcctgaagtatcaagtactaaagccttcgtataagccgcatctatcttgtttgacaaatagaagaaacagacagtaaatgcaatacccataatcagacaacaagaagatgcaacaatcacagttgttttaaaagcctgatccactgttttaaattttgtaagattcatatttatttattcttcgttatctataacacttttacctaatgaagcagcagcccctacatttgtagccccccctgctatcgctgatcctgcaatcgccatcgttgcagcagcagttacaatagataccgttttagaaatgattctaccggcatcaccatgaccgactatcttacttgccaaccagaaacaacaacaataagaaccgatcaaagcaagatccatgcctaaatattgtagctgttttgtcgcttcatctactgcgttgaatgcgtcagaatcataaattgacttaaatgtaaaccacattatctgatttaaaatattaatcacagtaaataccataccaacggaacacagtgtaccaaaccaattagacagctgcttttggaataccggtagaatggaaaaagcaaaaacgaagggacctaatatgacaaggatctttacaatgacaacgcccaaacccaatatgataatttgtacaatcccgaccagcagtgcggctagagcatgtaagagcattgctgcgaaattggcaggatttaatatttgggagatttgtttcaatgtagatgcactttcatctattttattaccttgatctatattttgtagttctttattcatagcaccttccggatcttcccccgcagcgacttccgcttcaagtgccgttttttcattatcggctatcatggtgtgctgttcttccgctgatctgtctagaaaagccgcaaactcctgtgcccggactgaacttaaagatgttgcttcatttattacttcaagggttccaacaacagtttttgcgataggtgtatatagcgaaagacagaatattaaagcaaaacagcgagctatttccatcaaatccggaaacttattttcatccgatgttaaaagctgactaacaccatgatataggtaattataagctatattacagatgaaacaaataactgctacaccaagcgcaattaccgtcatttgcgcagttaattctgttgtaagggaatcattaatctgcaatccccataaaaaagtatcttgtccgttcataaggctaattaattagtatatcgactaaaagcagataaatttccgctataatatgttttccctacatgttttcgacttgcatcttttatgatctcacttcttactatttcattaaaagatttcatttcagcagaagccgtttctaaggcttctcttacctgtccgacaaaggacattcttccctcactattcatgctgaaatagtcggaaacagtagcaaccttaaataatagatctgtgctcaaattaaggtttaccgtaacttgttggaagtttaaaaactttaaacaatgatagctaccgcctatattcatataaaaacggtaatcactacttagacaagctacatcatccaacagttcagcaagttctactaaagattgtagttggcgtagttggtctatcttttgtaaattttctcgtatatgtgcagcatcaatcatttcattaagctgcttaacccattgcgctgcattcgctccccattcgccaaggttcattcccatgtgagccggatcattaacaacccattgcgcactagccttttgaacagaaaaagagctacttaacagcaacacagaaaaaaataagagtatctttattttcataatattataaatttattatcgcagaataaacactatcgcaaatatcaaagccacaaaccaagcgactagatatgttcttgcattatctttctttgtagctaaagcccagactacaaaaatcagagaaacgcctaacattgcagcggtgatataccctgccacactaaaagacgtattgttaaattctcccgaccatccttttatctggttcaatccttctacagcatcattcatatttttttctcctttcttctaaataccggttaatagcagcataagtagatcctgtttcctcaaaaagctgtttgagcctaaccacagtcgattgtcttgaatcaaaagcgacagcggcaaattcagatacttcattgcgaaaaacataggtttcgtttcccaatttaatgaagaactctctccacttgatctcatcatccctattttgcagactatctatcattactagttcttcttctgaaatagaaagaatatctcgcagattgggcaactcctttctataacttgaatgatccagtattactttagtatcacagtttataagtattgaatccttgatcgccggtggacagttcttcaggaacagtacattttgggcagctatcgttatagccccgtcttttttacggaatgtacgatacaaataggcgataaaatcaccaaacttatcatcacttaaaaagtctagggcttcatcgataatcaattccttattaactccttcacgcttcttgatcttatcgataaccatttgaagcgtgataatcgctaccaaaggaaaatactccttctttgctgcgtcttccatatcaaacgcaattaaatcatcgttaactatatcaatattttcagttgcgttcaacaaaaaggatagttctccatccgtgtaaggttctagtagtaaaagcacttcctctatctcaaatctacgtttttcaaagtcagtcattttgtaaataaatacatctcgcaagaaattccggtattctatcagattaggaaaaatcctttcatttgttccatcaacagaagaattatttacatactcataaaatgcgatcactgattttctaagaatagctttctcggtgggatcgataggcttattttgtttccagatataggataaaagagcacagatcgttttaataagatcctcggctgcttctgcatctgaagtatcaatataaatatatctaccattccgatcacgttcacacaagaacgggttaaaagcaaactgtttctgatttgtagaatcaaaatatttacctcggtgcaggctaatcatagacctgtaagatccaccgatgtcaataattgtaatatcattacccaaagaataagactgataaatatagttgtttagccaaaaagactttccggagccggacggaccgattactattttatttctattgtttaaagccttgttattccataaatttatcaatgcaggatttccgaatcggtcattatacaaatgcccttgcagatcagaaatataaatactatctttttgcaaataacaaatcgcctgtttggtcgtattgataaatcccctataattgctccgagcattccccggtatattagaaaaaaataaattgcacaactccgcattctcgacataacaagaactttggttcataaaactaaatccctgctgtgccaatgaaattttccgaattagagaagaacgatccggatcattgataatcacattaaaagctgtataagctgtttgataatcaaaatccgtaatttctttacagaaaagttcttgctgtttttgcttgtctttagccggaggataaaagttagtcaaatagtttagcccgtttttttcagcattaatagccgttagcgtagtatctgtatctgttatttctatcacaacatttacaatgtgatcgaaaggcaaacctagtccaaccgggtacaacatagaacatttagactgtatattctccggaagctcaatcgtacttccatacgcttttgatttacccgtattgggtacattcagctcataaagattttccccttccacggtaagagaaagcatcgctaaatattcttgtccaaccttcagatcaccgctaggagttaccataattgggctaactgtttcttgagtagcgtcttttgttggtttagcatacgagagattaagataatcaaagacagcattatttaagtctttactatccatcttctttatctcaaattgagttatagaagataacccattttcaaaattcaagattttcggttcaatctctgataacctttcttcatagttcttgtagggctgtttaaaaggataattgagttttttaagcagcgatgtattagaagccttttttcgcactccctttttcaaatctgtattggcaaaagtgatatacaaatttgtatagcagtttattatttgcttgttattaaagtgtttaatactttccgctttcaatggattaacagaaaagtcattgttcttatactggcttacatagtaaaagcactgctgatgcaccaccgttgcaggaggtaacatcttaaaaagcccctctaacctctcatgtatatattttgcatcttcctgcgaaagagtaaatacttccggaagaaacaatctgtatccaatggttaaatctccgctaccgtttactataacgctatccgttatggtctggatcggtagtacagccgaaagatctattgatttatcagatataggaacttcagaaggacgcataaaaagtatggcgagtaatgtaatgacaccacacagtaataatgccgatataataataaatcctatcattttattttgtaattagttaccacatagtagatataaactctctgcaagaaaaagcgacagccttaatctgtatcacgtattccgcaggatttcaagatcatttctgcttcattataaaattgaataccttatgtttatctattatctgtttaggggttgcagatctaaccgataagccagttagataatccggattgccagctttatgttcccgttttaggttcttgaataagatacctgaagcaaagaatatagctcccatgacactaactatgattaccggatgcacatgcttaaatatgcaaacaattataatcaaagcatttgccaacataaatagaccaaattgtcccgacgttaagccaaagaacttaattggtctatttatctttcttatagtcctcattaatcagataataaggaaagctaccataataaccgcaaccgcaatgatccagccgagcagatactccttggcgtggggattattcgttgcaagggaatagatcacaaatactaaagctatgccaagcacggcagctaatacatactttgcgatattaagaatcgtatcagaaccttcttgcgctttcgattcaacatcggacaaactgctaatttttaatgcgctttgggcttctacaacttgaggaacaacaacaaaagtcagcaggaaaagccctaaaatcataataatacgcttgtgtacactaacaaaatctacactctttttcaaaacttgtaccataatcttaaaattttaattgttattttatacatgttatttatatatcaatcttgcttaaagcggaaaaatcaacactttcatatttgacaaaaacatcatctgatttttccgaaagtacttgatgctggaatggtggtatcttaccagcataatagtacgcccggtttgaaatatacatatccgctatctctctacttaattcttcatcatctgaaagatccttttgaaaaactattgttatgcgtggagataaaactagatcagaatcagatttttcttcttcaactgatagtgaagctgtacactccgttttctttttacttccggaaaaatagaccaatcctaaaattagaattgaaacaataactatcgtaactatcgccagatcaaataatgaataattagtggctagatattcagtcatttgtatatttatataagcgaccatattagtataaatattactaatgcaacgatatacgtaattatagcttctttcattttctcatgattagttattattttttttataaccgcaagacctgcacagacaaatccgacaccggctagcatttcgccacattgtttgaataagtcaatcaatgcgcttacatcagctgataataatatcataatcaataaataaggactttaacaccaagattccagactgtattccatttgcttgcatagctaaacggactccaatactgcttaacacgtccaagtatcgcaactcgtggagatacaaagtattctaattcaggctcgatctttaaaccaagtaagaaatcatacttattatcctgcctcttgtacgcttctacacctgtaaaaagacctagacctaggctaaaataaagtgaagaaagatttgtcgcaactgttttgaaataagcagcatcaatatagtaatcttttgctgtagagctaaaagaaactatcgttggaacttccgcagtattgctttcataactgtagttataagacttttcaaaatagttcaaacctattttccagtaagttgttcgactcctatactttgatactgaaaggtttaagttagtattattcctaccaaaaatattcaatccatagtttacttctagggctgaaatacctacataatgccgttgtgcataaacactatgtgtacatgcacataacactagtaataaagttaattttaataatctcatattcagtttaaaaaaaggttcgttttaataaattcaaaaatcaccttctctatatttttcaaaggctatgtacgtgctacttttgccgtaaaaattatgaaatatggttatgcacgtgtatcaactccggatcaatgcttaaatctccaactggacgcattacgtttatacggagtggatcacatctgtgaagaaaaaatatctggaaagaataaaaataagcctgttttagatgctttaattgcaaaattaaaaacaggagatcagcttatcgtgtggaaactagaccgattaggaagaagaacctgcgaacttataaaacttcaagaagctcttgaaaagaaaaacattgctctaattagtctaacagagcaattaaatacatcaacaccaatcggaaagtttgcgtttcatcttttatgctgtattgcagaaatggagcgaaatataatttccgagcgtacaatagccggtttgacttcagcaaaggcaaaaggacgaataggaggacgcaagcccggtctaacagatcaagctaaaaggaaagctaaactagcggctatagaatacaccaagtatctacaaaatgaaataggcacgatagatgatgtttgccggatagtaggagtttccagagctaccctatacaagtatctaaggatagaagggattaacatacagggcagaaaaagataagagaatatttttccgaaagtatattcttaattatctgtctactaactgataatatcaagtttaaatataaaaaatatacttagaaatttgctcaatactatcaaatttgatatctttgaaataaattctaagtaaaatgagtaatataatatctaaatataaagaaacaggcatgataagcatagatcaaccagtaggatataacaccatgaaatcccgtctttacaactggaaaaagcgaggtttgttatcacatattcgccggggagtatatttgccggctaacatacagaacaagtatcagatagcttgcaattccgttgataacggttgcctagcttatcattctgcattagagttctatatgttacagacacaggaatttaactggctttatgtgcacagttctactcccttccggtcttttgagtacctgaaccagcgttatgtatataagcctttgcagtttatatacaaaccattggttacaaaaaaagataccggctatcctatcacggttacatcaatcagccaaaccataattgactgcttaaacaatataggcttagccggtggcattgaagaactgttatttgccttaatcgaggttgatccggattccgtaatagaagaagatatgttagaatgcctgaagctataccaaaagaaaagcctgtatcaacgtacaggattcatcctgtcccagcttcaggaacaactaaacctatcggatatgttcttcgatgtatgtaaaaagaagatgggtaatacaacaagttaccttacaaatccttcccgttgtgatacctatttcaaggaatggaatgtatgtgcgcctaaagatgtaatgaaagaaatagagaaaggagtatattatgagttttgattatacacaagaagaaatcactagactagcaaaagaaaataattttacggttgctggaatagagaaagttatgcgattatccaatatcctcaatgaccttaacaatcagccggagtttagcggtaaattgttactgaaggggggaacggctataaacctgcttgttttcgatcttccccggctttctgtcgatctggatcttgatttctctaaaaacgtatctaaagaggatatgttagcggagagagaacaaatcaacaaggctttagatagctatttccagcagaacgggtataggaagaccgaaagaagtaattttaccctagattctctctctttgcactataatacggtgacaggaagcggagataagataaaactagatataaactatcataatcgatcccatatattcaaaccggaagttaaatctattgagtttcccttcatcagagagaacaagacttcatttgtagtaaactacgtcaatcctatcgaattgtttgcaggaaagataaaggcgttctatgaaagatgtaagcctagagatatatatgacctcttctcccttgcatcctctgatatattgacgagcaaagaagaaagggatcttttaaggaaatccattgttttttactcttctcttggcaatccggagaataaggaaatgttaaaggctgatccaaaacaaagcatagagaatgtgacctttacggagataaggcagcagctacttccgatgatgcataccaacagcggaaaatatcccatgcaggagatcaacgataaggtggctgatttcgtatcttcgctaatgaaattagagccttcagaggaactgtacctgtcaaacttctacgctgggaaatataagccggatcttttgttttctgataaggagatcctgaataacatacaagatcatcctatcatcataagaacacagcaacaaataaccgattctattttttcagattcaataaaaaaaaacgattttacccggatcgctgggctgaaggatgaagggtatatcccttcccctaaaataatagacgagctgaaaaaatccgcaccggctccaacaatgatagcagtccagaagatcttcggtctgtcctctgacgctcccggattaagcaacatcaaactagcccaaagcgataatgtagggctaggtaaagataaaagtaataacctaaaaatctgacgttatgaaagtagactttgacaaactgaaaagggatgtttcccttccggagttttttctctatttaggctggaagtttgtttccggatcttccaactcgtcccctaagatgagcaacggatccgataccgttattatcaagaagaatagtaaggattactatacctattgggacgttcacggagaagcacgaggaaagactatcatagatctaatgcagaagcatatctacgaccagaccgggagaatgcctagcctgcgagaagccggggaagccgttcagaactatgtaaacaataaagaagtcgtattatctcaagatagccggtttggagttagcaacgcaaaactagatcctaatcagctggcgttcctgaacagccaactgaaaccctatcaaggggatttcttgcaaaagagaggaattactcaagatacactatcttcaccggtattttccggggtattcacctctagggaacaccggaaagatggaaaagtctataataatacctgtaccagacttattaaccaaaacggctttcagggtatttcccaaagggggataagacctgaagacggcaagagcttcaaaggcatatcaggcaacaaatacgatagtatcgtagtgtctaagcatgacaagacaagaccaatagagcatatatatatcagtgaaagcatgatcgatgctgcgtcccattatcaaatgaagcttctgaataccgaaaagaacatcttatatatcagcactgaagggaacatcacacagggacaaatgggcgttataaagctgctcctgtcaaagcaaaatattaataatataaccgatcaggttacttatatatttgacaatgatagcaacggctataaatatgcgctgaagctagatacattcttaaaaggtcaagagttacccaatattgaaggtctgccagttgaagaactgaaggataaagttcttcaactgcctaacgtggagttatcggtaaacagtgattggaacgatgatctacaagcatccatatcaaaaggcaaggaatgtgagttccaagatgccataaaaaaaaacgattttacccggatcgccgggctgaaggatgaagggtatatcccttcccctaaaataatagacgaactgaaaggatccgcaccggctccaacgatgatagcagtccagaagatcttcggtctgctctctgatactcccggactaagcgacataaagctagcccaaaatgataggcaaacaatcgggaaaaatattgagcaggcattataatttttccaaaataacaataaccaaatttggttattgtattaagagtcattatttttgccaaaacaaaattatagtcctatgaatataaaatatgaaaaatacttgtcaatggaagatgttccggcaggtaagatattggatgtaatccttaaaaaaaggaatatatctcaaaaaaagttagcgcatatgtcaaatgaatatccgcaacgtatttgtgactatataaaaggggaacgaaaattcactataaaagcctccatttcaatagaaaaagcgttaaacataaacattgaaggctttttctttaaaatacaagccaaccatgacatatataccttcataatgaaagaagagcgaaagaaacatcctgacttatctaaactaagtaaaggattattttgggacacacgaatagataagataaattggataaggaacaaggaatgggttatacaacgggcttttgaatatggcaacgatatcgagatcaaggagattattcggttctatggaatagaaaccataaaacaagtcattcccaacataaaaaacaaatggaatagtaacacaagaaacgataactatcaaaaatacattctatgaacttacattatgaaactgtttctcctttattaaaagaaactctgcaaaagctggtcaatagtcctatttttaaagatttcacgcttataggtggaacctgtttgagcctacaactaggacatcgaagatctattgacatagatttattcactgatatagattatggaaccatgaatacaaaagaaatgaaagagtttattcaaaggagttttccatattccgagaatacagattctctggacacatcagctttaggatatacactatacatgggggactcccctatagacaaaattaaagtcgattttttctatactgaaaaatttattttccccatacaagaaatcgaccacatacgaatagcagacatacgggaaatagcagccatgaaactatctgccattacagaagaagaaccaagacaaaaagacttttgggatatccacgaactaaatgaaaaatattcattcaaagatatgatcgactggggaataaaaaggaacgaatggagtgttacagaggaaggtatattaaatgggtttcaaaaaatagattctgtaaaagaatcacctgaaggaatagattgcttcaagggtaactactggtcattagtaaaagatgatttaaaagaaatggtagatcaatatctaaaagaaaaagacttttttcttgccataaaaaaaaatgactttgcacagatctctttcctaaaggatgaaggatatatcccttctccggaagcgataaacaacctgaaaggatccgcaccggctccaacgatgatagcagtccagaagatcttcggtctgccctctgatgctcccggattaagcaacatcaaactagcccaaagcgatagcaaagaactaggattaaacacagaaaaaagtatctaaacacagattttttccgaaagtataataacgggatcaaacaaccggctaccagagtacccatgcaggaatatatctttccagctggtaagtgcttgcacctatcagccggaaaggtttattccgggtactccttttccgactgttcggatcggtgaaagtcattcggtttaccggatggctcaccgaaccgatcaatcggaaaatagcctaccttattcgggtgggtgggcattatgcgttaaggattgaagcgtttaccatgtagaagcggaaagcctgaccgaagggaacgcctaaaacataaatatcattttgctactctcctactccattttatagctggatctgtccttatgctcaactgtggcaatatcattttgtacaatccggaagattgatttttgattttttagacagatatcactatcattttgctttttatatgtgcaaaggtcagaagcccccagagaaaaccccgccggaggcaattatagaaagtctgtgtatcgtttccacaaaatgtggaaatgatacacagataacagttcttcaataaatatatgtgttttttgtatgcttttgattatcaggtatatatgacttgtttgtttgtttggcacaatgtttgttctttgtctttcagaaaccatatgttaaatatttaaatagattggattatgaaaaaggtattatttgcagtagcacttgttatgggattgggtagttcagtggcattcgccggcaacatggtatcggatgttgagattgtggtaatggtgaacgattataagccaatcgaggtaaaggatctgccgcaggcggttcaggacacgatcaagaaggatttcgcagacctgacaatcaaggaagccgcagttgaggaaagcgaggaaggcacaaagacctacaaggtgacatttaccgatgcagaaggcacggacagcgaagtgttcttcaacgagaagggcgaagtcctgaaataaagcaaatgaacagcaaaaaagagaattcaattaaactgtgtcagcaaaattaatattttattgctttgctgacacagtttgttttacagcccctccggttccggtgacttgtaaggcttgaaagcaacccgaacctccttatgctcatcgatgacgaaagtctgctccggctccacagaacgaataatgacgccattgactttccaatacatgattgtccatgatttggaatgggtagcacgaaaatgcaccgttgtgcctttcgctatttcagccggagagatcaattctcctatcttttccgcagccgtattttccaacttcggtttagccgaaagctgaccttcaccctgatccacaccaaatgccagcactactttttccactgcgggaggaagaggaggatcttcatcattgtcacaagaaaccgcaaatagcgtaagcccatacaacaaaacaacgacaaaagagagataaccgatctgtctcattaagccggtttcttttttttccatagcagttttcataagcttattttttgtttaccctacgcaaagataacaatttgttggctaaaaggggttattaaatatagtgtttatcacttaatgaataaaatttaaaggagacaaaaatgccacaaattcttatagacagaaaaacatgttctaaatgcaatacttgcgcaactgtatgtgtaatgggaatcattgataaatcgacagccttaaattatccaaccatacctgaagaaaaattggattattgtttaaaatgtggtcattgtgagtctttttgtgcacagaaggctcttaccttagatttccttcttgacgaaaaaattaatacgtcttttttggatagtcagattgaaccacagaatatagcattgtatataaaaagtcgacgttctgtgagacattattcttcaaagacagttaataaagagttaattgctaaagttattgatatagcccgttatgctccatctggagggaatggacaaccagtaaaatggattgttattcataaaccatcagaggtaaatcgtgttgcaagtttaaccgttgattggatgcgaactattcaaaacacatcacatcctctagcagattatgtacctgcaataatttcaacttgggatagtggtttggatttgatttgccataatgctccccatttactttttgcacatgttcctattgagccaattgatgaccctaccgaagcaattattgctttgactcattttgatattgctgcgcccgcttttggtatcggtacatgttgggctggattcgtaaagttggctatagacaattataaaccattaaaggatttgttatcaataccagaagaacgtaaagcggcttgtccaatgctatttggatattcaagttataaaataacttctattccgagacgcaatcctgtggatattacatggaagtaaaatagaagttacttaatgactaaaatggtgtattaaacagttaatcttgattcagtaaaaaaaataattttgttttactgaatcagactctaatcaactaacaattaagagggatggtttttttcaggaactctctccaacatttccaaaaaacaacattcccattgttttgcagccaaactaacaatttgacaattaagatttattccatatttatcagcaataactctgacttgactttttctgaatattgtctttaatacagttctggctggcaaatcgggtttttgcaacaagaaagtgagaaaattcagatattttcttttcaattcataacttattgacattttttttctttcaatctttaaaagtgctgacttgacttttggtggtggcaaaaaactctcatgagatatttcatacataagttttaaatcaaaaaaagtatgataaaacacaatatatggattgaaaactttttttgaaaataacttttggacaggttcaagttgcattatcaatgaaccacccataaaatgctcaacactatcaaacatcaaggattttaaaatttcagaagttattctgaaagggatattagacacaactttaaaatttctttttggtatggtgtaacatctaaaatcacaatcaataattttgacattcgtgttgttagaaaacttgttttttagaatggacaatagcgatttatcattctctattgcaattagatttgtgcattgacgaactaaatgaacagtcaaaaatccttttccggcaccaatatctataacagtgtcggattcatttattttcgcaattttaattgcatcatctatcagcactttatctatagtaaaatgctgtcccgtgtatcttacgggcagtttattttttatcattacttatttcttgctgaattcaagttccaaatgcaacggaattcatattaataatttgtttaaatttttcgtttggtgtgaggtatccaagtcttttacgaggtctattatttagattgttttcaatccatttaatacgcttgttggttacttcactaaagtccgtaccctttgggatatactgcctgataagaccgttagtattttcattggcaccacgctcccaagagtggtatggcttacaaaaatagaaattaatatctaatttttgtgctatatcctcgtgttttgcaaattcttttccattatcagccgttattgtgtgtattaagttttttacttttcgtaatgcccatactgtaatctttgctacagggatggcttctttccctgatagcttacgtatccatactctgcttgttgctctatcattaatggttagaatagcacctttgtgattctttccaataattgtatctatctctaaatcaccaaatctttctttttgctctacaattgaaggtcgctgatcaatctccactctattcggaataaatcctctacctgcgtttttagaaccacgctttgaatatttgcgtccttgccttctaagagatttatgaagatccccaccttgtcgtttatcttgccatatccaacaatatatagtttcgtgagataccatagctatattttctacttggcttctgcccactatctgctctgggctcaagtcctttcgtagaagcttttttacacgcttcttcatagcttgtgtaaatacctcctttcgcttcttttcaaccttacgtttatctgcctttctttgggcaagatcagggttgtattttccactacgactatcgcaattgcgttttatttctctataaatattactcctatcaactccaatagcttcagctatatcttttttactcatcggaacttgcaacatcttagaaattgcatacctttgcttttcggttatatgtttactcatctacaacttttatttctttggacggacaataaaaacaaagatagtaacatttatccattcagcagagaacagagggaattgtctctcttttctctctgaaaaaaatattacttatgcagctattaatccttttctttaaaagttgcatttataacttgaactcaagatttaaggttaatatcctgtaggttgcagggagaacaaacgggaacagccgttcccgcccctttcggattgtatgccagcacccctaaaaaatgccttgtcaaagacaagtagtaacacgcctgtgttacgttttcgacttttcagccgtccgaccgccaccccgtccgatttgacttgcctttgaggttatatatgcaaatgcaagaagccccccccggcgaaaaccccgccggaggcttttacaattcaaagggaggtgtttagaaatagacgttcaacataaggtatagtaatgcgttcttatccttagtgtcgtggtgttcaagctcgaattgaatcttgtcctcacgagcgagccagcctatcgcactggcagcttccagatcattgaaccctgtcaattcctttacttcctgcaaattccatttccggtgtacgtctgtgcttaataagcgccagagtttccctgcgttctctctgatgatgtgcttatccatacctgtattttttataagtttataaatggtttcaaatggataatgaaaagcacttttacatcaatagtgttacgcactgcaaacattccagcgtttatcgtttatccttttgatacgttgtatcactctttcctgatatacagcaaaccgtttcgccgttcgatgtatatcttattctcacgtgcgagccacccggcggcgagtgcggtttcatcagccgcaaaatttagccttctcgcaagctcggcaatggttataagtccggtttcgcctaatttttctaagatgatcccggctttaaatcctatatttgttttttccatgataaaatttatatttatgtatcaaaaatatgtatatattctattattcaaaacgtgtagaaatacaaatttaaattcaccccccctattagagaaaattaacaatttgtatatcaagcttttttcatcctcaaaatggaatgactattttagagggtattaatttagtaatatatagttgaagaacaacgctctgaaacattccttgtcactattaaacaggcacaaatatctcccctttacatcctcaaagaggatataatacaggcaggaattaaccccgaatctatttgttctgatgatttttgaatggcttaatttttggcgtacttgtttttccgtcagcccttcgatgtatatcaaccctttcatgtttcccatttgtccgggcgtgatcttgagcgagcttagtagttcgtttaggtcaaacagcttaggagtgtttgacaaagagtttagggactgttttcgctgtgtcttttccattgccataatgtttttgcttgtgccctacaccaagccaataaacataaaaaaagcggaagggcattcgcctatccgcaagcgagggagtccaagccctatacacacaaacaggagataccccccgcatatcacggggagcatttatctgtttctctgtgtataatgcaatttttggacttttcgcttgcacagaaatcagctaaacgctttttttcttcaatatgtaaaaacacggtcggtttacgactgcacaaaaataacaatttccctataaaaatgtttcctatttagaataattttttcttgtttatcagataaacaacaagctacatttctatatactcaatattttccaaaccatataacgggatgatattccgaaagaacacatctattgctagaggatggttttgaaaagcaagaaaagatttccccgctacggattccagccggtaaatggtcacttcatcttcttccccaaactgtttccttaacttatcattgatcgttttctgcatcttagacataagtttaaccaccgtaacaggattccaacgatccatttctacagtcacctgcttactgtcggaaaaaatagaaatgcttttctcaattcctttagaagctatatagtaagaaaagaacaaaagagcttccatgccgtttttgcctacgtacagattgatcctagcgtttctctcctgcgctttcttgcagacatgcgcacaaaggataggattagaagaaggcagaagataagaagtattctgctgctctgtctgtccttctaatatactaaagatagcaggattccagcacacgtttacgacatcagaagttacatcttcatatatcgctgcacagcaaatatcattgtcaaacacgagctgatactctttactttccgggttgaactggtaaaagttccgaatcttatgcgcactcttcagttcaaaaaggaaatagccctcgttatttgaaacctttctcaccttccggatctccgtttttccttcagtaatatcaaagagataagctatcagatcttctttgctacatacgtgatcaaaactaaactccttcaattcctcgctttccgattgcacctgtactttcgcttggatggatatagataattgataagcgctaagatctttgaaatcgaacaactccaaacaggatatcttgtttcgttccggtgaataaattatatactcccggtcattaatataataccggtacatgaaatcgccggtttctaacggctggtatggatttaaaacttcgctgtagttcatgattaacttgttttaaattaaatgcaattggttcgatatgtgtattcatcaatcatatcattaccgataatatcaggtagctcaaaaaatcttgtagctgggcaaacatgggcttcaatctctatgcaaagaccgtcacccggcatataggcacaacctacgctatcgttccagtttatatgcttttgggctgctttagctactttatcgcaagctgataagtattcagcatatttactgtttgctctttttatttttttgaatagtatatcgttcatttccgattcgttatacgttaatcttcatcttcaggcattaattgtcctgcttcataataatactgagaacatatatctgatacttcattagataaatagtcctgtatttccgaaattttatccaacagcttatcacgagtatctatctcttccggatcaatactgaacccagaatactcctcaaacgattttatcaattcgcttacgtttttgaagcgatttgcttccatactaatttgcttcttttttttgcgcattttctattcaattttgttattaatatgataatcctttatttcgctttttctttttcttgttgtccggaagatcttcatcacctttccggtgcttccctgatccgttatctaaagccattgacatggcaaccgggtacatatagataagatccttctcccattcgtgcggattactcgcataacacacgataaccggatcgatgggtgttgctctctcctgttcttttccctgttccggattctgctctttttggaagaagtcttgtatgttctgataggttaatctccttgatacatcagagcttttaaagatttccggagtatcgacatttgtaagggcaaaggatatgccgtatatccctttaccgttgacgtgctcgatcagatttatattatgctccgctagccggtctttaaaatcttcatagctggatgaaccattaagaactgcaaagatcttgttatacagataatgcttttgctcgtctgcggtcatttgttttccggcgaacaaaagtttcccaaaccggtacgattccggaagggctgtatctttcagataaaagcccctatcaggaatgccatatacataatgagatttccccttgtccgataccagacgcatataatacccttctttttccaatcgatcccggaactctttcatgttgccgcattcctgacgcaaacgatccatgacggaaagtaactcgtccttgagtaatggattaaagaactttccttttgataacatatctaacatattttcgtatgtatcttcccccaatatgattttccattccgcattagtataagccttagtcatatcaggattaatcgttttaaaggtttccgactgccctagaagatccttcacccgttcttttgcattatggctgcgcaaagccttgtgcaaagctgtgtcaaagaaatattgccggtactgggattctcccaacgtcttgttccgggaagactttcctttctccataacttcaagcccatgtttaagctctagctctcgcatgatctttccagaacgtcccttgctgtaactatcagagatccacaagccgtttaagtctatcgtagtggcaagtatatgtacatgtcggtggtccttatcatcgttctttatgatggtgtagcaagaatcaccgtatcccattctttccaaatattctttcgctacttcagaaaacttttcgtccggaagatcctcccctatcgggctgctaagaataaattctatatatggtgatttcacacgatcattcagaccagcaacaagggacatattacgatacatattaataagagaatcaccagaagaattatataattccctagctacactgctttcaatcttctttaactgataatcgattttgcggtttaatgcttctcctacaaacgggtcttgtatctccgctatcatattagtttatctgttatttgcttcaactctttaatgtacatctctatactttccaatgaaagacgaatattttcatcaacaggtaaagagttaacatgctttgcaagttgattcaaattagtacctatttttttcagttcaaagacggtttgaatatccgcttttgaagttatcctttcccctaaaacagattttcttaaatacatagaaagtgttacaccttcagctttagctcgtctgaaaacctgttccttttcttcttcagaaagacgtgcccgaataactttagttctattctctttcattctatattcctattctctattctaatgtatgtgagtgaaacgaacatcactcgtcagctcggctgtcgcaaggtgggttttgtagctacaaaaccacaccttgcatatacaaagatagataaaaattataaagcaccaaaactttaagatctatactttcggaaaaatcaacccaaagaactgattccctaattaaccaagtaaccagataacttaacaaaaggaagaactgaaagcacggcaacaaaaaaacaactagttaactagtttatcagaaaactaa

SEQ ID NO: 623 - DNA, 12391 bp, Phocaeicola vulgatus
  source 1..12391: mol_type = genomic DNA
gtatactcacaattaaatcattgtatacatgaaaaaacgattattcagtttgttctgcttgttaggaacggttgccggattatttgccggtgatacggcttatttgttctcttatttcattaatgacagtcgggacggtcttcatttggcttatagtttggatgggctgacatggactcctctgaatcatggaaaatctttcttgatacctacggtcgggaaggatcgtctgatgcgtgaccctagtatttgtcaggcgccggacggaacttttcacatggtgtggacttccagttggacagaccggattataggttacgcctcttctcccgatttaatccattggagtgagcagcgttctattccggtaatgatgcatgagcctgctgcacataattgctgggcacctgaattgttttatgatgaaccttcgcaaacttattatattttttgggcaacgaccattcccggacgtcacaaggaagtgccggtcattgagagtgagaaagggctgaaccatcgtatttactatgttacgacgaaggattttaatacattttctgaaaccaaactgttctttaatcccgatttcagtgtgattgatgcagctattgtacgcgatccggtgatgaaagacttgattatggtggtgaagaatgaaaactcgttgccggcagagaagaatttgagaataacacggacaacacggatagaggatggatttcctactaccgtttctccttccattacaggaaattattggtgtgagggacctgcgccactttttgtagatgatgctctttatgtctattttgataaataccgtaatcatcaatatggagctgtttgcagtcgtgatcatggaaagacatgggaagatgtgtccgaccgtgtatcttttcctcggggaacccgtcacggaactgcttttaccgtagagaaggctgtacttgataaattgcttcgtatccatcacttcaatcctcttattccggataatatcgctgatccttctttatccaaatttggtgatacttattatctttatggtactactgatattgataaaggattgtcacaagcagggactcctgtggtatggaaatctaaagattttgtaaactggagttttgacggatcacatattgtgggattcgattggcataaaggacatgaatatgtcaatgccaaaggagagaaaaagacgggatattttcgttattgggcacccggcagagtagtggagaagaatggtgaatattatctttataccacttttgtaaaaccggatgagaatgcacgtacctatgtgctgaagtccgaccgtcccgaaggtcctttcctttttgccggacgtaattctatgtcttctcattctttggatgggtttgatcaatcttgtattgctccggatatagatggggaaccttttgtggatgatgatggaactgcttatttattctggcgccgccggatggctgcccgtatgactgacgattggcagcatttaaccggtgatactgttgtgatgagtacggctcgtcaagggtattcggaagggccggttatgtttaaacgtaaaggtatttattattacatctatactttgagagggaatcagaattatgtaaatgcttacatgatgagccggcagtcccctttgtcgggctttgaaaagcccgaaggcaatgatatttttcttttttcatccattgccgataatgtttgggggccggggcatgggaatgtattttataatgaagaaacagacgattatattttcgtatatctggagtacggtgacggaggaactacccgccaagtatatgccaatcggatggaatttaatgaggatggcactataaagacacttgttcctgatgaaaagggagttggttacttggctgtcagtcaggaacagcgcgaaaataaggcgctgaaagcttctttcagtgcatccagcgtacgttctccccgtacttctaaggttgaaatagaaactcagcctaattgtcctttggctgataaaacttcgcttgtcaaggtggaacgcacacatatatatcaccctggaaatgcaggcgaccggtctaatggaacacgctggatggcagaaacaaatgatgatcatccttggctgatggtggatttgggtgaagccatgcaggtaacggagtgtcaatttgcctttgtacaccctgctgaaggccatgcctggcatctcgaaaaatccaatgatggtactaattggcaaccttgtgccggagtaaaagaggtgaaggcatgttcacctcatgtggtgacggtgggagataaagtacgttatttgcgtttgcacatagataaaggtgcagccggattatgggaatggaaaatctattaaattactattttatcatgaaaaaacgatttgtgaccgttcttttggcttgttctttggccggaggactttttgcacaacagccttggtttaaagacaaggatttgaccttgaccggtgcttattattatcctgagcattgggatgagagtcaatgggagagagattttaaacagatgcatgatttgggttttgaattcacccatttcgcggaatttgcttgggcgcaattggaaccggaagagggaaaatatgattttgcctggttggataaagcggtggctttggctgccaaatatgatttgaaagtcattatgtgtacttctacggcaactccaccggtatggctgagccgtaaataccctgaaattttgattaaaaatgaaaatggtaccgtgcttgatcacggagcacgtcaacatgcttcttttgcttctcccgtttatagagaactggcttataaaatgatagagaagttagctcagcattatggaaatgattccagaataatcggctggcagctcgataatgagccggccgtacaatttgattataatccgaaagccgaactggctttccgggattttttacgtgaaaaatatcatcatgacattaaagcattgaatgatgcctggggaacggctttttggagtgaggtttattcttcttttgatgaaataactcttcctaaaactgcccagatgtttatgaatcatcatcagattttggattaccgccgttttgctgccagtcagacaaacgactttttgaatgaacaatgtttgttgattaaaaaatatgcaaagaaccaatgggtgactactaactatattcctaattatgaggaaggacatataggtggcagccctgcacttgattttcaaagttatactcgctatatggtgtatggagacaatgaagggatcggtcgtcgcggatatcgagtgggaaatccgttgcgtattgcttttgccaatgactttttcagacccatacaaggcacttatggagtaatggaacttcagccagggcaggtgaattgggggagtatcaatcctcaaccgctgcccggagctatccgtttatggatgtggagcgtatttgccggtggaggcgactttatctgtacttatcgttatcgccagcctctgtatggcacggaacaatatcactacggcattgtaggtacagacggaacaacggtaactcccggtggacgtgaatatgagcagttcatgaaagaaatcagacagctgcggggacaggttgctgctcgtgaggtgaaaccggccgattatttggcgcgtcgtactgccattctttttaatcatgaaaattcatggagcattgagcgccagaagcaaaatcgtacatggaatacattagggcatattgagaaatattatcgcacgttgaaatcttttggcgcgcccgtagattttatcagtgaaagcaaggagttctcctcttatcctgtgatcatagctccggcttatcaattggctgacaaggcattggtagacagatggactgattatgtaaagaagggtggtaatttggtcttaacttgccgtacagcccaaaaagaccgccatggacgtttacccgaagctcctttcggttccatgataaatgaactgaccggtaatgaaatggagttttatgatttattacttcctgaagaaccgggcaaattacggatggatggaaaagaatatacgtggaatacttggggagagatattgaaaccgggtaaggattcacaagtatgggctacttatacacaggaattttatgaaggaaaaccggcagtcactactcgtaagttgggaaaaggtactgttacttacgtgggagtggatagtacggacggattattggagaaagatattttgaagaaactatatgcgcaattgaatattcctgtgatggatttaccatacggtgttactttagagtaccgcaatggtatggggattgtactgaattatacagataaaccttataagttcgtacttccttcgggagccaaagtgctgataggagagccggtgattcctacagcaggagtattggtattttctattactgattgaaaacgtatgattgatagaacaaaaaggagcggcttcacagtcgctcctttttacttaacctaaatctaacctttaaatcatagtctatgaaaaatcgattcactaaccaatcatattattaatttaatttgtaaacctcacttccggcgagcaggaaacaccctactccaaaatcttcaaaatcgggtactttatcgtatgtgacaggttgactgtctttcggttcttttccggttccttgtacaagtcctaggaagccgttagggtgaacggcatccttcaccatagcattccatgctttcaacaagactggcaggtattcttttctgtccaacagtccgttacgtaccccccatgccatgccatatacaaataaagcggtgccactggtttctttacctccgaagtttgattcgtcatgcatacttacattccaaaaaccatcagtacgttggcaatttttgatagctttactcatggtcaggaagtcattgatatagtcggcgcgatgtttttcatcagtaggaatttcatccaatacacgtaccagtgctgcatatacccatccattaccacgactccaatagcaattcttaccgttaggttctttgtaagggggatcaaagtcttggtctctccaccacaaaccttctttttggttgtacatgccattctcaccatgtttgttacgggtatattcatacatatcccacattttgtcgaaatatttttgttttccggtcaattttcccagtttggcaaatacaggcattcccatttggatggcgtcaatccaccaccaatcatttacttgaggagtgttgaccagcatatctatattggctttgaccttacggattctttccggatcgggacaaatgttatataaatcaatgtaagtctggctggcacagtaatcatcagcattgcgagtggtggtaccgttgcggaatccccattcgtggtaatttgaccaatcgacagcgtatttataatagtcatcgcgtggatagacggagtaaagagccattaatccttcataatatactccgcgtgtccagatattactgggacgggttacattttttacaaaagaaggagtacgataatcggcatacttcttcatgaagtaatcattgacttttgtaacagttttcaacgtttcttttttgtccggcaagtcttgtgcttttacaactccaaaacctaatgcaacaaaaaagaatgatagtattaattttttcttcatcatgttgttttagtgttttaatggtagcgcaaaaataggatggtctgggatttcctacaatggaaatgtgtacatcttccttgaatattatgcatgtgtacgcatttcgagtgtattttttatttaacagtgttcttattgggttatttgtctttatttgcagaccgttcataaatcttttctccttcttttatctctagttccaaacctttaaaattaacattggccacatttgagatgcttaatcctttttgagctttgatatggcaattctcaaaaaagaatgtatcatttccgaatggagcctctttaaaaccatacatggttcctgctgattgtgcttctccatttatattcttgaaatggatattgcgcaaacaggtcagcggataatgtgcaggtgaaagcggaggaaccatacgccattccatattgatatcaaagatactgcgcgctcctttgatggtaatatcttcaaaagtgatattttccacagttccgccgcggctgggctgacttttaaaacgtaaggggctccagttttcgttatccatcaggcaggaacgtatggtcacattgcgtatgccgcctgatatttcactgcccatagccactccaccatgaccgtatgcaaaatgacagttttctatcagaatgttttcactgggacgtcctactctgcgtccgtcctcgtctcgtccggatttgatggagatgcaatcatcatgtgcctcaatgcgggtggaagtaatcagtatatcattggacgaatcaatatctatgccatcggaactgggtatatattccaatgcacggatatcgattccatctatagtgaagccatttgtgtaaagtacatgatacaattgatagattagactcaagaatgggtgaatattatttgttaactgcaaaagaatcaaagttctctttgtctgaatatctattcttttgatagggatgctaccttgaactttggttattgtatgctttcttttaattcatatgataaatcatggcttgatttcatcgtggaaagcaggaatggccagcagccatggatatgatgagtgtataaatctataataaaaataaggaggagatgaaagatcttttattatggaataagatttctcgcattgttatgttattagccgaatgtcttgacatatctccggtgcgtgctttggatatcttttataatagggagaattgccaatttctgtacaattccagttttggattttatttgacgagttatgtttatattttagatgatattatacgagaacttctaacgaaaggttactaatttttaaaggtataggcataaaagcgcataatccttatctgaaaaacaataatggacctctaaatctaaagcatatagatgaagaggtccatatattatcagtgatatattacggtttaatatcccggattctgcatggcacttttttcttcattagttaatgttccaccgttttcattggtaattccgtccaagaatgattgtggtagtggacgataataatgaacctgaggattgaattcacccaagccacgacttactccatcgttaaacgcatgccaacggtcattcaggctctttgtacgggctaaatcttcccaacgtaacatttcaccgcaaagttcacgggtacgttcgttcagtaaaaaacacatcatcttttctgcattggaagcacaacccaatttttcatagatcgggatgtctacttgtgaattgtacacgtcttccacactgttcaaggtcataactgatttggtggaagctgtagtttcctgaccttccatattattagactcataataggtgttgatttcccaataaacagctccttcagccgagtaacctccaccttttcctgtacaatatgaattgttcttgtaagactgtccgccatctacgtgtttacttcggtcttcaccttcagcatacccggcacgggtacggagtttgtttatccattcaatagcctgtggataagaggattcacctttacggatataggcttcggctatcattaacacatcttcagcggaacgggctataatggcatcacgcgtaccaaactgtgaagcgatcgaattacgtgatccgtcacgatatttagacaaagcgactgaacgcttatggggaatcacctgataccagttgccagtcagattggaaatgtcagtattccagttgtgagtttctcccttgaagtaacggacaaacgtgtgaggagcctcaatgacattgttcttggtcacttttacatttttgtcaccaaattcatagtcttcgtaacgagtatctcccggattgttgacaatatacttgatgcccagttcacctcctgtaaaacgcttgtctcctgcacttacaccaacaggagctttgccgcttctgatatcagcttcagtccaatcgggtgcacctttggtattattacatccataagtggtaatgaatgatttccagaaacgtgaatcgtttacacggtcaaatacatccatggtatattgggtcgcacttacatagcagaattcacggccaccggaaatgtcacggttcgttccattcatatcttgataaactgaaggaaagcataagtgcatttggttaccatatcgtccccaggtggattcatcgttagagaactgtgctgccaatactacttccgatactgtttcgttagcaccgttaggtgctgtgtaatcccataattctacaaagtcattgcataaggggtgtgcacttaccacttcctgtccgtacttaattaccgcatctaggtcagcggctacgtattgtgtattccagctagaatacagttcagaagcacggaataaatgcgccttggctaggaagtgggcggctgctgacttcgtgatgcgtccagtttgctccggcttttcgggcaataacttgtaggcttcctccaagtcggcaatgatttgtgcatatacttcttcttcactattgcgggtgaaataggtttccactcctgtcgaaggagttaatttcagaggaattccaccaaactgtttcaccagttcaaagtaaccatatcctcttaagaaatatccttctcccaaacgggcattataagtaggagactgtggattataaaatgccggtacatttgctataatcaagttggccggttcgatagtaccatacaagttgtcccaaatgggcttgattccggtggtttcacctgaatttagtgattgtccgtagtggttatagtgtgcagctgtattgttgccatctgtaaactcatccgttccttcgcaataaaccaagtatccccattgatagttaaatttggttttcagcattagataggcgccatttaccaaatcatcaataccttcttgtgtcttgaaataatcggtatcgtatgcattaatttggttctcgtctaaaaaagactcactgcaagaagtcaatgctgcacttcctaacgccatacatgcggcagcagaaaataatatgtgattcaatttcatatcgataatttgtttttatccgttatatattaaaatccaacatttaagccaacgacgaaacttttcagtgtcgttgctgaaccgaaagttttagtattgttatcatagttcagcaaatctgtatctaaccagtcgcatgctttataaatagagaaaggattcatggcctgtacatatacttttaaattactcaaacctgtatttttcagttgtttgcttgtgaaattgtaacctaatgaaatattacgtaccttgatgtaagaaccgtcctgataattcattgaagaattataggtatcagctgcctcgccgtttgatcctggagaatagtatactgcgtcttcgttgcttccggctacccaatagtctaacttacgttgcatgtagcgcccatccaatgtagcggcaccttgtggcacatcgaatcccatacgggtgatgataaagcaagatagttccaaattcttatagctgaaagtgttattccatcctcctgtccaacgaggacgttctttaccaacaatttgacggtcattagttgcgtcgatagaaccgtcattgtttaagtctttcactttgatttgtcctggcttgcgaccatattgggctgcctgctcagcttctgaggtcttccagataccgtcatatacatagtcataatagactccgatttcttcgcctacgaaccaacggttgtttacatcttctgtgtttccgtttgccaaggcatcaatttggctgcggtccatagaccaagtcagtgtggtattccaggtaaaatcattggtttgcacaggaatagcattcagttgtaaatcaataccccaacccgatgtttttccaacattagctagtgtggaaacatatccagtcagtgaaggaatggtcatatctagtaacaagtccttggttttggtcttgtacacatcaacgctaccgctgatacgattgtttaagaagccataatcaataccgacattatattgagtcgtcttttcccaggtcagttcgttattggccattttactaggattctttgcagaaacatcagacggaagatagccgatagatgggctttcacttccccattgataatagagtgactgaatagctcctttagtagaataagggtcaatagccgcattaccagtaacaccgaatcccaaacgaagctttaattggctaatccaattaatatctttcataaaatcttcttggtcaatgcgccatgccaaagcggcagaagggaatgttgcccatttgtgtccgggagctagtacggaactaccgtcccagcgaacagatgcagtcagcaaatagcgatctttgaaaccatagttcatacgagccatgtaagaagtcatttggctttcagttaaaccggtaccaaaaccactcaagcttccggccgaatgcagattgtaccataattctttagaagaagctacgttggtagcagtcatatctcccatttcataatgatatttggaagccgactgcatcaatgtcaaaccaaggctatggtctttgattgtcttgttatagtaaatcaagttatccaatgtccaagaacgcttttgttcatttttgtactgggctttgttattaccgtcaccattgataccttcggctgcattggcaatacctaatgtgtaaaattggaattcaggaccaaattggatgcgatagctcaagccttccaacggttcccatattttgccaaaatctatctgagaatacatgctggcattggcacggaacgtacgacgctggttagtattgtaatccaattcacgaatgggattgatgatgttgatatcaccatttggaaggcgaatataatcaccgttggcatcgtaaggtactgtccaagggagcatgctgcgcaatgctccataaaagtctccggcaccggtgactgatttggagaaattataaccataatcctggtcggcatatgaaccgttgacagaggctcccattttaaagaattctacgggattagcgtcaaatgacacttttagtgtatagcgttcgtaggcttgtccaggctgagttcctttttgattcaggtaaccgaatgaggcgtaaccttggaatttgtcagaaccacctgatgcgctcaatgtatgttcgtgtgtgatgccggtttgtttgccatggtcagtccagttgtatgagcctactttcgatgggtcatagtttccgtttgaccatgcttggtctatgtttgcccaagaagcagctacgccaccgaaagccaaacggtctgcttcataacttggagcaaaagcagcgtctctgttaccgtatgctcccatgttgtattttgctagacgggcataatccaaccattcgctggccgacatcatgtcagttacatcgtgtaacgtttcaaatgtaacagatccggaatagtttagagtaactcttccttccttaccttttttagttgtaaccaagataacaccatttgcaccacgtgaaccataaatggcggtagcggaagcatcttttaaaatgtcaatagactcaatgtctgaagggttaatattttcaataccgccattttggataaccataccatcaactacataaagcggactttgttctgctttgatagagcgtacaccacggatattgatatcgcctacttcaccaggacgctggctggaagtaatatccacaccggcagtttttccctgcataccttcgagggcatttttgacaggcatggatttcagttctttttcacccacacgtgccatagcaccagtcacatcactttttttctgaacaccataaccaaccactaccacttcatccagtgtttcggtatcctcctccaagattattttaacggtagattgtcctttcacttggatatctacggtcttgtaccccacaaaacttacttggatcgttccattatcaggaacattctgaagtgtgaacttaccatcaaagtcggtaattgtaccattggtagtacctttcaccaccacactggcaccgattacagactcacctgttttgtcaaggacagtacccgaaacggttttgctctgtgcaaaggcccctacagccaatacggataacaaagcaacgaagaacagccgctggaacttctccaaacgacgt

SEQ ID NO: 624 - DNA, 10363 bp, Phocaeicola vulgatus
  source 1..10363: mol_type = genomic DNA
gggacatcgattaaaatttcggtggctttttctctttagtctgtttgcaggtcctctgcccctttcctttggaggacagtcggcagtagctgcaaacaatattattcagcaacaaaaaatatcagtgaccggtaaggtcgtagataatttaggagagcctattattggtgccaatgttgttgtgcaaggtcagacagtaggtactataaccgacattgatggagtttttaagctggatgttcctaaaggagctaagttattgatttcattcattggatatagttccaaaactgtagaagtaaaacaatctaacattgaaatagttttggatgatgattctcaaatgttaggagaagtagaggttgtagcttatggcgttcagaaaaaggtttctgtgactggagctatttccagtgtaaaaggtgaagaattgacaaaaactccaacaggctccatttctaatatgttatcagggcaaatggcaggtttgactaccgtacagtattccggtgaaccggggagtgatgcagcgaatatttttgtccgtggtcaagctacatggaatcaatctgctcctcttattcaagtagacggtgtggaacgtagtatgaatgatattgatcctaatgaaatagaaagtatttctatattaaaagatgcttctgctacggctgtttttggtgtacgaggtgcaaatggcgttgttttaattacgactaaaagaggtaaggaaggaaaggctaagatttcatttacgacttcctcaagtattattgccccgaccgaaagtattaaaatggctaattcttatcaatatgctactttttataaccaaataaatactggtgatggtttgaatcctacgttttcggatgaaataattcagaaatttaaagatggttcagatcccgttcgttttccaagtgtggattgggtagactattgtttaaaagatatgacccttcaaacacagcataatgttaatatatcaggtggtacagaccgtgtacgttattttatttcagcaggagcttatacacaaggcggtttatttaaagaatttgacttgccttataatctgtcttatcaatataatcgtttcaattaccgttcaaatctagatattgacgtaaccaaaacgacaacattatcaatgaatattgctggtaatgtgaataatgcttctaaaccttatactggactgggtagtgccgggatgttaataaacatgtattattccactccgttttctagcccgggacttgtcgatggcaaactggttaatgcaagtacggactatccggatttgagaatgccttttactggtggtagcggcatgggatactatggtggaggttttatgcgaaccagtaataacaccttaaatgctgatgtccaattaaaacaaaaactggattttataactaaaggattgtcattccatattaaaggatcatacaatagtggttttacatcttatacacaggctagtgctagtgttgcaacttatactcctgtattacaagaagatggtacgattgcttataagaaatatggacaaaattctcagttgaaatatgaagataaggatccggctaaatcacgtgattggtatatggaggcagccttaaactatgcccgggaattcggtaaccatcatgtttcagcattattgttatacaatcagtctaagatatattatcctagtgcatattctgatattcctcgtgggatggttggtatagtgggacgtgcaacttatgattggaaaaaccgctatatggcagaattcaatattggatataatggttccgagaattatgcacccggcaaacgctttggtacttttccggccggttcttttggttggattgttagtgaggaaaaattctggaaacctataaaatcagtagtaagtttcttgaaatttcgttatacaatcggtctagttggtaatgatagttttgacggaaacaagcaacgtttcctctatatgtctgatccttatgtagttaataattcttctttaattaaccgtgatggtcatggttttttgtttggtatcaataattccacagtaagtcctgctgcttatgaaaatggaaagaataaccaagatattacatgggaaaaagcgttgaaaaccaatttgggtgtagatgctaatttccttaatgatcgtttacgcacttcatttgattattatcatgaaaaacgtacagacattatgttgagtgacggtacggctccttctgtattaggatttactcctccattggctaatcttggggaaatgagaagctggggttgggaaatcactttaaaatggaatgatcaaataggtgacaatttcaggtataacgtaggattgaatttgatgtacaatcaaaatcgggtggtagagagaaaagaagctccgcaaaatgaagagtatatgtatcaaaaaggacgtcgtcttggttcacgcagtcaatataaattctttgaatattataattcggaaacaacccctgctcattacaaagaagtatatggtacggatatgccagaacaattagtcagtgatttaaaaaatggtgattgtgtatatgtcgatttaaataacgatggtaaaatagattctaacgatatgtcacgtcaatttggtttcacagatgatccggaatacatggccggtcttaatatgggattcagttggaagggatttgatgtttcaatgcaatggactgccgcatggaatgtaagccgcagtatatcaagtgtattccgccaaccttttacagaccgtacaaactcagatcaaggaggtttgttggaatatatgttagatcatacatggactccagagaatccgaatccaaatgcggaatatccgcgtgcgacatttatcaacgataccaataactatgcggaatcaactttgtgggagaaagatgctaagtatcttcgtttgaaaaatctgcaaattgcttataatttcaatcttccgtttatgaaaaaactgaaactgaatactatgcagttagcgttaagtggatataatttattgacctttactccatatttttggagtgatccggaatcaaaggctagtaattctccctcttatccgctgacaaaaacatattcattgagtttgaaacttggtttttaatcttaataatgcaatcaaatgaaaaaatataataaatggatttttaatgttgcttcaggactggctctgacatctgtcatcgctacttcatgtgtcgatgagattaagtttggcaactcttttttggaaaaggctccgggagggtcggttacaaaagatacagtatttaataatgctgaatatacccgacaatttctgactaatctttatggcatgcaatattatgggcttccatataagaatgtggctaatcaggaaagttccaatcaatatgtaggcaagcctgaagctttaacagatttgtatgttttcacttatccgtcatgtggaatctcaggaccatattataaaggtactcacactgccaattatggtaaacgttctgataaatttgattatttaagaaataatgtctgggaagctgtacgtggagtatggatgttgattgagaatattgataatgtaccggggctaggggaagatgaaaaagcttctatggtggcacaggcgaaatgtattcttgcttcccgttattttgatgtatttcgtcattatggtggcattcctttaattaaaggtacattcagtggaacggatacaagctatgaaatgcctcgtaacagtgtggaagaaacagtgaattatatggtacaattgctggatgaagctgctgctgtacttccttggactgtagaaacacctgcatctgaatccggacgttggactagagcggcagctttagcttataaatgtcgtattcttcaatttgcagcctcacctttatttaattccgaccagccttattacccgggagcgacaggcaatcctgctatttggtatggtggttataaaccggaactatgggatcgctgtctggaagcgtgtgaacaattctttaatgaactggcttctaaaggtggatatagtttacagcaggcgaaaggtactcgtccagaagattatcgtttggcatatcgtgcaggctatgctaatttggatagcccggaagtattgataaacacacgtgtaattgatattgatgcattcaaatcaagtcattataattggcaccaatggggagatcctcttatgagcattcatcgtggttacagtcctacacaagaatatatggaaatgttcccttggaaagatggtacgccgtttgattgggataaggccaaaagtgaaggaaaactggatgaaatgtttttgaaaggaacgggcacaaccagtgacggactgataaatatagaattgacccgtgacccgcgtatgtatgaagaaatcattgtaaacggtcagcaagaatctttggattggaccacaggaaatatgtcaggttattgttttgaatcgtggttggggggaaagagtgccggcaatggtcctaccagtcaaacaggttcatttgctacgggatatgcacctatcaaattcttaatgggaaacgatatgctgcgtagatatgtacattggccttgtatccgtatagctgaactgcatttaatttatgcggaagcattgtgtcaaagttcacgaggcagtatggataaagctatagctcaagtagatattgtacgtgcacgtgtaggaatgaaaggattggcagaatgtaatccggataaaaatttacaaagtaacaaggatgcttttatcgaagaacttcttcgtgaacgtgcttgtgagctaggtatggaagatgcacgcttctttgacttgattcgctataaacgagcagatatatttgaaaaacaattgcatggacttttcatttatcgtttggatgacaacggagtacgaagagatttgccttggcgtggaaacgatgaagggaagatggcttatccgacccattttgaatatgaaaaatttgaattgaataacccaactcgttattggtggacaaatggatttgaccctaaatggtatctttctccattcccgtcaacagaagttaataaaggatacgggcttgttcaaaatcccggatggtaataactaatgaatacttcaattacaatttgaattaattattatgagaaaaaatagattaattattccggcactccttgcttttttgagtctgcaagggtatgcacaggaactcaatgatagcataacttccggtaagccggcaaaatattccgatgaagttgtagaaatcggatatcataaagctcaacgtctggaagaatctacctcatcaatttctaccgtatataatgaagatttcaataagcgtagtgctaaaaatatagctaattcgctttttggatatggtacagggttgacaactttgcaaggtagcggacgatatgcagatgccgaacctacattttttattcgtggtctacaaagtttatccactaataatccgttaatattggtagacggtattgaacgtgatattacagatgtcactcctgaagaggtagaaactgtcactatattgaaagatgctgctgcagtagcaatttacgggcataaaggtataaatggtgtagtaaatattactaccaaacgtggtatttataatacacgtgaaatcaagtttacttatgatcatggtttcggttggcaagcacgcaagcccaagtttgtagacagttattcttatgcaaatgccatgaatgaagcattggcaaatgacgggttaacagcgcgttatacacaagatgaattgaacgcatttcgtagtggtcaatatccatatctgtatgctaatgtggattggcttggagaaacttatcgcgatatggatgctaccaatatatataatataagtttccgaggtggggcaagcaaattccgttattatgctatggctaacttgactactaataaagggtttattgccaatccttatatgaatgatggatattctacacaggaccaatactccagagccaatttacgtactaatttggatattgatctgacagaaaaaacaaaattgaaattaaatgtattaggtatcctgtcagaaactagaactccgggagcgaatggtcagggaggtgctaatttatgggatatgatttatactttaccttccgctgcttttcccgctcgtttggaaaatggtacatggggaggtagtgcgacttgggctgggaccaaaaatcctttagctgtatcacaagcagcggcttacacaaagttccacgaacgtacattgttcgctgatatgacgctgacccaggatttatcatctataactccaggactaggagcaagcggtatgttatcttatgataactatgcccaatattgggaaaatcattctaaaacttttgtttatggtagtaattcggtaactgcatgggaaaatggtgtaccttcaagtacgacttattatactgatggtaaagaaagttcgatgagtagtgatgctaaatgtattgcatttacacgggtattcaattttgcagcaactttattttatgacaaacagataaataaggacaataaaatttatagtcaattaaaatgggactatgaataccgtaataccaaagggaccgatcagacctggtatcgtcagaatgcctctttctatactcattatggatacaaagataaatattttgctgatttgagtgtagttgcttcagcgtctaataaattggcaccaggacaccaatggtctatatctcccactgttggcttagcttgggtcatgtcaaaagaaaatttcatgaaagatcttttttggattaattttatgaaactgagggcttcgtttggtgtcattaataccgaccgtcttccgttggatgatgacagtgaggttactaactattgggaacaaacatatggtggcggtggttattatccatttgatacaaattattctgtaggaacgcaaagttggtcattaggtcgtttggcttctttgaattctactcatgaaaaagcatataaatataatttgggtttagatgccagtatgttcaatgggttggacgtatcttttgatgcttattatgaaagacgttcagatatttgggtgtcttcaagcggtcattattcaagtgtcttaggatttactgctccttatgagaatggtggtattgtcgatagttggggagttgaaattggtgctaattatcgtaaaaaaattgctgacattactttaaatataggagccaattttgctttagccaaaaatgagattatcgagcaaatggaagaaccgcgtatgtatgataatcttataactacaggtaagcctctgaagcaaacttatggtatggaagttatcggatattttaaggatcaagctgacattgagaatagtcctaaacagtcatttggtgatgtaaaacctggtgatataaaatataaagatgttaatggtgacaatattattgatgcgaatgataaagttgctataggacatagtactactgctcctgaaatttactattcattcaatttgggagcagaatggaaagggttaggctttgatgctatgttccaagggacaggaagatattctgctgtattaaatacgaagagtttatactggccgttaataaataatacaacgatttcacaggaatattatgataaccggtggactccagaaaatcaagatgctaaatatcctcgtttgagttctcaaagtaatgagaacaattatcaaactaatactttgtggttggcagaccgctcatttttgaaacttcgttcaatagagttgtattacaagtttccacaaatatgggtaaagaaaagcaagatattgagcaatgcaaagatttatgtgagaggtgttgatcttttgtgctttgataagattaatattgccgatcccgaagtttatggagcgacttatcctttaactcgtagtgtagtggctggattaactattggcttttaattgttgaacttaaattaaaaacatgattatgaaaatcaaaaaaatagtgagcggaatagcatgtatggtaactttggctgcatgtaatctggattatcacgaatatgccaattacggaaaagactatatagatgaaagttatgaaaatgtaattggtatgattaccaatgtttattccatattagactatgactttggccaaacatataaaggtggaatgctggcatctgcttgtgatgaagctgaatatgcttatacaaacaatgatatatgtgattttgtaaacggatcttggagcccggctaatccaatgtctaacatctggtctagtagctataaagcaattcagatatgtaatcagtatctggctgaatttcaaggattgacatttgatgagctaaaattgaatgatgactatcgtgcacaaatgttccgttataccaacagtttcaaggaagctcgttttttgcgtgcatatttttattttaatttagtacgtgcttatggagatgttccatattttacagaaatggtaactacagatcaagtaaacagtctgacacgcacccctgcacaggaaatttttaacgccattatagcagaatgtgacaaattatctacagaattacctgcagactatacaaaacttggattggacggaattgccccagcagagaacggtcgtgttacttgttatgcagctttggcattaaaagcacgtgctgctttatatgctgccagtctattatttaatccgggaaataacaaagatttgtggcgtagagcggctgaagctaataaagaggtaattgaaacttgtacagctaatggttttaaattaagtaaatattcagaattgtggggacctaacaactggtcaaataatgaaatgatttttgttcgtcgatataatggtaacatcagcacattggaagaatataattttccgatgggagtgccaggtggaaactccggtaattgcccaacacaaaatatggttgacgcctatgaaatgaaagctactggaaaaatgtggaatgaaacaggaagtggttatgacgcttctaatccatatgccggacgtgatccacgtttcgatatgactattgtaaagaatggagatacaaaatggccgtcaaagaatgccaatcctattgaaactttttatggaggtttaaatgctgaacctctttcaggtgcaacccctaccggatattatttgaaaaaatatttggattcagccattgatctgagtgctaatagtacaacaaaaaccagccgccattcatggatcacttatcgtttaggagaattttacttaaactatgcagaagccatattccaatatacgggttctgctgataatgctggtgaattcggaatgacagcttgtgaagcggtaaatatcatacgtaatcgtactgatgttaaaatgccggaatttccaacaggtttgtcggcagatgccttttggaataaatatcagaatgagcgcatggtagaattggcttttgagggacatcgtttttatgatctgagaagatggaaagatggtgataaattaaagagcatcatagaaatgaaacttacaaaaaatgaggatggtactatcacttataaacgaaatgttgtcaatcgtgtttgggatgataaaatgtatcttttcccaattccacaatcggaacgtatgaaaaaccctaatttgtctcaaaacgcaggatggtaatagaataaacgtacaataataagaggatgcatcaatatgtataaagcatcctcttttacctttaaattataatttatagaaatgtcatgaaacaatctagattttatatcctctttttctttgtagtttgtatcgggctattttgctcttgtctcagtaatgacgatgatgcgcaatggtctaaatttaatggtgtatatgttacggttggtggagacaatattcgtggctacaagttatacacggattttggtgcaattttagttccaacagaagaaagtcttaatcgtataccttggttaaaagaagtgcaacgtgccatagttagttttaacttattggatgaaaatgaaaatacaactcaattggaggacggaaaaacttatgatgttatattaaacagtacgaatggaatgaaccaacagattcctacttttacagttcatgttgacactttaagtgaagagtatcaaatattcggtcaagactctatccaactaaaaaataagagtatttattcattagataaaacggccggagcattctatataaaaaatggttatatgaatattgttccaacttttgagtatgatttata

SEQ ID NO: 625 - DNA, 8329 bp, Phocaeicola vulgatus; identical to SEQ ID NO: 5
  source 1..8329: mol_type = genomic DNA

SEQ ID NO: 626 - DNA, 5768 bp, Phocaeicola vulgatus
  source 1..5768: mol_type = genomic DNA
aaaatgtaattacttgattttcaataaacttaaaaaatcacagctatgttaaaacgactaaaatcagtcagtatgttgctgttcctaatgggtgcctctaccggagcagcatacgcggtcgccaatcccggcgttaccgatgtgaaaatcacacaacaaagtggtacatgtacaggaattgtcaaggatgctacgggtgaaactgtcattggtgcatctgtagtagtaaaaggtacgactaatggtactattaccggacttgacggtgatttttctttgtcaaatgtaaaaaaaggagatatcattgttatttcttttgtaggatatcagacacaggaagtaaaatggaccggacagcctatcgatgtaactttaaaagatgatacgcaacagttaggtgaagttgtggttacagctttgggattgaagcgtgaagaaaaagctttgggatatgcagttactgaagtgaagggagatgaattaaaagctgccaataccatttctccggtagccgcattgcaaggtaaagtagccggtgttgaaatctcaggatcagatggtggtttgtttggtggtaccaagatacagattcgtggagcttcaaccttaagttccaacaaccagcctatctatgtggtggatggagtgattctggataacggtgtatctggtaatacgacagcagactgggacgcaggtgccaacaacgccagcgactatggtaatgagttgaaaaacttaaatcctgatgattttgaaactgtatcagtattgaaaggtgctgcggcaacagcattgtatggttcccgcggtttgaatggtgcggttgtaatcaccaccaaatccggtaagggtacacaagggctgggtatcagcgtttctcaaacatttggtattgaccatgctttcaagactccggatattcaaactttatatggtccaggatacatgccgggacaatctgatgccgaccaaaatggaagtatgtgggatgaacatcagtttacagtaaatcagaatggggaacatacattagtaggagtacccaactttggttttggtcctagatatgatggctctcaaatccgcaattatgatggtacatggactacctattctccacgtaaaaataatatgctggatttatataaattagggttcaatacaaacacgaatgtttctattcgcggtggtaatgaaaaaacatcattttatacatctttatcttataaaaatgccaaatcaacaacagaaaacaatacttttgaacgttactccatgttgttgaaagctagccataagttgaacgattgggtggatgttgctgcttcttttagctttgccaactcaaaaccgcgtaatgcacaactgaatgcgggtgaattgtttgtcaatgcaaataccaatgtgattaacccgctatttgacgtagattatttccggaacaaatatttaggtgagcatggtggtattgccagtaccagctatggtgaccaatatggttcggttccttccagcgctaaaaattatttcttcaaagtagataattacgattatgtacggaaggaaactgttattcgtcctacatttgaagtaaatgtaaagatgacagattggctgaagtttaaagcagacgctaatatgaaccgttattatacttctatagaagataagcaattaggttccggttatgcaaacgaaggaggatattatggtattacgcaagatataaaagaacaatttaccgtagggggaacttttactgccagcaagcagataaaagatttttcactcggtggattcgcacgatttgagtattacaacacctcttcccaacattcaaaagtatcaactgacggaggaatggtggtgcctggagaatggttcgtggagaactcaaaaaagactaaaaagagcgaatcgaccatatcgggcagcaaaagaattatttctgccatttttgctttaaatttaggatggaagaatcaattctatttggatgttacaggacgtaatgactggtcttctgcattggtatatgccaatcgtacaggtaatcactcatacttctatccttctgtatcaggttcatggttgattaatgaaactttccgcgaaagtatgccttcatggattaacttggcaaaacttcgtgcatcatgggcacaagtaggtaatgatacagacccatacgctgtcaatcagacgtattcttttgccacaatggaaatgtatgacggcaatatctataccaatgaactggacaaactgatgaagattgccgaccttaaaccggaacgtaagaattcatgggaaataggtttggatttccgtacttttaataatcgtttgaatttggatttcacttattataaggaaaataccacagaccagattatgaaaatcaatgttcctgctatttccggtgttacccaacagttggtaaatgctggtaatatccaaaactcaggtattgaaatcgcattaaataccactcctatcaaaactaaagactggcagtgggatctggacttcacttatacacgaaacagaagtaaaattgtatccttgcatcctaatgttgccaactatattgaattgtccggttatgtaaacgcatacgactatcatatcggctctgtagcaaaagtcggtgagtcttatggtgtgttgatgtcagatgtcactcaggcacgtaatgaaaacggtgtacctttgttggagtgggatgacagctggagaggcgcatatagagcacaaagcaaaacagcggaagtagtgggcaacatgacacccgattttctgggatctgtagcaacaacgttaacttggaaagatttaagtttgaatgtcggactggatatgcgttttggaggtttggtggcatcttactgtaacttatacggaactcaggccggttggacagaaagctctttgcaataccgtgacccggaacatggaggtatgacttggactagtcaatacgccgattccaaaggtattcaatatactgatggtatgattccggaaggtgtttttaaagaaggaacaattgcgaccttggtggatggaacaaaaatggatgtcagcggactgtcttacgcacagctggtacaggaaggaaaactggaacccactcatgccggttcatggtatggaaataattatgcatggggagcacagacaattgatgacatttgggtacacaagttgagttatatcgctttgcgtaatattactataaattatcgtttgcctaatagcatcagtcacaaactgggtgcaaaaggattgaacctgtcattcagtgcacgtaatttgggatatctgtataattcattacctaataacctgaatccggaatctgtacgttctaattcagcttcagagttccgtattcgtggtttcgagccttatacggcaagttacatatttacaattaatgccaatttctaattgttaactttaaaagaattatcaacaatgaaatatagaactttagcagccgcactgcttttaggaagtgtaatgtttacttcctgtgtagatgaattctctgaattaaattcagatccgtctactattacaaagcctgatattcgtttcctgttcactaaatgtgaggcttctttccaaccgggagattatgcacagtggtttggaggatttaatgatctttctacctggtcgcaaacaacagtttcatcaggaggtaatacaactcgttcaaatcgtccgactgatgaagccaatggttgtggttatgaagtaaacgaagttcttcgttatgctaatgagattcgatatcaaatcagccagttgcctgaagaggaaaaagcgacttatgaatatatccaatatctttgtaatcctttgttggtttatttaagtatccaagatgccgacctatatggctcacgtcaatatacagaagcagaacaagccagatataccaatcctcctttgttattgcctaagtatgacactcaagaggaacttttggaagtatggctgaaagaactggaccagactattaattatctgagcagtaacgaaatcaaagatgttttgaataatcaggactttatttataaaggtgatttgaaaaaatggggcaaactggccaattctttgaaattgaaaattgcagcccgtttgataaacaaagaccggaaccgtgcttttgaaatagtaaaacaggtagcagaaagtcctgttggcttaattgctactacggatgatgactttgtatataacaagggtaagttcgataacaattggaataatgatttttctgtaggagtaggtacgcaacatcttatagactttttggtaaacaacaaagatccgcgtttgctttatttcttccaaaagaatgactacaattctaatgttgtgcaggcttattttgatcaaaaaagagaaatgccggattttgtagaaaagaatgtaatttctgaggttaaaaatggaaagaaagtctttaaagaatggggtggtccaggtgaaccttgggtacgttattatggtcttcctgtagaaataggtgcaggacagatggacaaatacgaggattattttgaccccacaggacaattgtttgttttgtactcggcagctggtgccaagaaaagctattatccgtgtacttaccggaatcaagaaatggtaaaaggtttgttgacatatacttatccggatgctccggatgttactccggttcaggacactcaacaatatggctggtatggtctgtatttttcggcagcggaaaccaatttcttcttggctgaattcaccctgttgggagctacttggaatggacaaaaaagtgcccaagagtattttacagacggtatcactgcttcagtaaaaggatatgattatgttgccggtcagaatcatataccttattatgacagtccttatgtaaatgaccctcatgatgtttccattaagctgcaagaggaatggctgacagaactgcttaagaaagaggcttataatttaagtggagataaagcttctgatttggaaaaagtgtatatccaagaatatctccattattttaatgcaccgattgatcaatatgttaacattatgcgttctggtgttcctatgaagaatagttccattttaccgcgtaaggaatttgacgaacaattgggtgactcttatcctatccctagaagatttgctgttatggagcctttggaatcagatcagttacatgacataactatcgctgcatataaagcacaaggttatacatatcaaggtacaaatgcaaaaaatccgcaagttttgcatgacgaacgtgtatggatggataaagaaaatcctgattttggcaaaggaccgaagaactgaaaataaaattaaagaataacagttccccttgtttttcctgtaaaaacaaggggattgttttattttgaccttcaggactatacatagaattattttgcaaatattatttatatgtaagtaaagagttgattcttcttgaaaaagataaggactttctaaaacaatgagccgatgctgttttcatttgtaagatgaaaaactttcccatcaattattgaaagttctcattcttttacggaatgtaatactcccttatttctttgtgcaaagtagtgatttgggtagaaatgaagtagaaaatttccatttaaagtttgttttaacggctttaaatggaaatttctttttgtcgttatcatattcaactccactgaatatcaatacaatagctgtaagag

SEQ ID NO: 627 - DNA, 5513 bp, Phocaeicola vulgatus
  source 1..5513: mol_type = genomic DNA
ccttactttgttgattttccgaaggtaaagaacaactgccttcggtttgaggtcagcccttcagtggaagaaagtgcaggcatgaccgatgcggactgggtgaagctcggcaacgacttcatgcagcgcatgggcttgatgaaccatcagtacatcatcgtgaagcacagcggaacggagaagaacagcagacaagcccacctgcatatactggcaaaccgtgtgtcgttatcgggagaactctacaaagacaactggatagggaagagagcaacggaagccgccaacagtatagccagagagcggaacttggtacagtcaaaggacataggcaaagccaacagggaagagataaaacaggctatggacggtgtccttgcaaggatgcagggatttgaccttgccggattcagccgggaactcgaaaaactgggcttcagggtaagggaagcccgtgcaagtaccggcaaacttaacggctactatgtaacgagccggagcggaacggaatacaaggcaagcgagatagggaaaggctatacgcttgcccacatcgagaagacacagaaaaaattgaagtataactcaatcagcaggaattatggaaacaccctcaaacccaaagacggaggattacacctataagcagggacagtacagcccccgaaagagaaaggacacaacgcccaaagtaaatccgcagcttgcggtagaacttgtgtttcaagaattgaagcgcgtagaagcctatacgaagcgcatagaggacgcaacagccaaaaaggtagaaatagacagggaaagccttgaaagtgccgaaaatcgcctaaaaaacgtattggcggactttgaacggcagggaaacagaatgaaaaacggcagctatgtggacaagaacgcttctatgtattcaatcctttgtgctgttttctccctattgttcgcctgtctgatgtgttacctatgggtggatgcagccaaggacagggacaactacaagaggtattatgaatattatcagcaggaacaaacagaaaagcaagaatgaaatttcattcttgcttttctgtgcttatattaattattcttaggtaatgttccatatttccatttaatagctgaacatggaagaaatgcccctgctttttgaaatgtaccatcaacttttatttcaccagaagcaatgtggattccaacggctcttttagtatttgggctgaatatcaaacctccactatctccatcttgtgatttatatgttgcaactgcaaattcggtaaaagttcttcctgataatttcgttttttctacaataattttgcctggaccagaatgataaaatcctttaagggctatcatattgtctttctttacattgtcataggttccgtccacaatttgaatagttgtattgttatacttgaaaatattggatgagctaactttatcaacaagagtgcatacagccaaatcatgtcctgtaacatcgcactcgatacactctcctaactttgttgttaaatcttgagtatctataatcttattaccaacagccttgactgtatgccctgcggttacaatacacggttttgttttgtaaacacatcgatagcctacgcttcctccaccttgggcacaataaaaatccgcacctggtatcatgggggttggggttatagctaaagaactggtttgtttattgctttctaaagaggtgtttccttcagaaaaagaaagttgccaaaattttattagcggtgaattaattacttcatttttgaaattattgatgtttgcttcggaagcatcttctaacataacaacgacctttccgtctttaggatctatgccgcaagcagaaatacccaattttttccatactccaatttcatctttgctattaataaaatctctaacttgcaaaagttcattcattgtattaacgccctcttctataatgaatagatggcttttacatctttgttcaaggtcttttttataatcttttatatttgtgccttttacttttatgaccaagataccatctttaaaatagctgccacaataataatcagggtaagaaacttgctcaccttctgctcttgcttttacttcaaaagatgattctaaattattaataatatcatttgtattattctctacaggttgattttcttcattcgttggagaatttaaatcagtatccgaacaagaattaagtccaaatccaagaaataaaaatgcacttaaaaataaaatctttttcataagctcttagtttaaagttatcagccataaaattagaaaataattggtctcgttgttctctgaaacaggattttaactatatttctttgagttttctcttgatagcgccaataacatatcctttagggttttctgccagccgtgcgcctttcttcaattctcccaagaatcccataaaatcggggatgcggttctgcccttcaataagggttttcttgttcttgttgatttcatcagacttgaaggcaaaggagaatttaaggtagtcatatacgttgttttctaactggagccgtgccgtaactttagccattcgtgcttgctcctgtagtgcagggtcttctctatcttcaaagaaaacagggaacagagtccatccaataaccttcttcccttccttttcctccttagccacaaacgaataaggagagaacttgtcaagttctttttttgcgacatcaataacctttctgcgaaagtcgtttaccctttcatatttcccttgtagattgaatctttcccgaagcccgtcagaaccttctaacggcacaaacaaaggtgtagtttgtcctgacatgagttcataaaatcgcatggcataaacacttttgaatttcatagcggttacaagttcatattttttaaaacccttagtgaaatcaagagctgctctccaaacaggctcatagacatggaaagtggcaacgcctgtgcctttctttattttggggtgctctattatggctgtatagaaccaaatctcatcatcttcatactccgcccccttttttgaaagtgaggtaaatgcagcctttgctttggtatagttgttgtctgtttcatctcgaagtatatccgccacaggcatagtgatatttacaccgcagtctgtcggctcgattttgtgcatatggtctttgattttaataccttccaaccatcgttgggcaaattcgataagacgatatatgatacgcttttcgtaaggactgaaatcgtatttggcacatgtccatatataggactggaatacggctttgtttggtaggttttcgctcataggacttgcttttttagattgttgcgtatgggtcaagctccttaatacgcctacacaaataatcgaagcgtttcttagtaagcggtgtaagtgtatagaggttctcgccatcaaaattctctccaaagataatgtcgtccacccctatgccgtgattataattctcacgcacgcaatcacgcagaatccaaaggttgcgcaggttcacccagtctgccgttttattcttgattctgctgaacagcacagcagctgtgtagaggtagtgtccgcaatggttgtagtcatgcagtaccagtttcccttgatagtatatgtcgaagtctttgctttcctcatcttcctttgtatcgcagtagaagaacggaatatctttcagaccgtcccaatcaatgtaagtagttggtttcatatagtgctgttttataggtttgcagcaaatatacgaataaagtacgacctcaacaaataaaggtcgtatattttattctttatgtcgtttttaaagtgttaatttttattctttatgtcgtattaaagtattctttatgtcgtacttggagggcttttccctcgcataatgcgcgcgcgcgaggatagacatagatagtcgatgttaagatagaaacaggctcataagattgagattgcttccaaactttcggaaaaaacggatgaaaaacaaaagggaaaacaaagacaaagcccccttataagggggttgggggattgtgcggttattgaagcttttccccccgcgtgttaaagtatattaatttggttacaatatcggtagcaatggttacatttgtatcacaatcaaaaaagtttaagatatatgcaagtaattccattgagcaaatttcggacgaatcagacagcgacccttcttcgtgctattcagggagaatccgtctttctgacttcacgtatcggtgattttaaactggtgccagtgtccgtagaagaaaaaatagccactcgaataagagagggcttgaatgaagtgaaacgaatcgaagctggtgagcagccagccaagagcgcaaacgcatttcttgatgagctttgaagtaaagactaccccacattttgagagggaagcgaaaatccttgcaaaaaggtataagtcttttaaggctgacatgaaggattttatcgagtcattggaaaagaaccccatgcagggggatgaactgagcccaggtatccgtaaaataagacttgccattgtttctaagggaaagggtaagtctgggggagcacgtgttatcacatacacgatttgtgcatcggaaagtgaaggtcgtgtttatcttgtggatgtctatgataagtcagacttctctaccgtaagtgtatctattctaaaaaaaatcatatctgaacagggtatcctttgaccagtcagcgttagtgaagcgaactgtgttttttttctcttttcggtctgcaaaggtaactccacactccgaagccgtcaagggcttcgcaagttcggatctgaaaaaaatcctgagcagcttcgctgtgcggttttttccgctcgaacccttgaccgctctccgtgttccgttgtgggaatggcagggaaaaaagaaaaaagtgtgtggctatgcagtgtgttagcgctgtgtgtattcccatgcggtatgtgtatatatagcaagaagtgtccttgtcggacattcttgcctttatcgctttgctcaaaaggattttaagattacctttgcgacatggaagtaaatcgaacagaaaagataacattccgctgcactgcacttgaaaaggcggcacttgcggaacaggcagcccgatgcggtatcagcacatcggagtactgccgtacactcgcactgggcggacgacccaaagagaggtacacggaagaagaaagggaactgtttcgggagatagcccgactgaaaggaacactccagcgtctgaataactacttcggtgggcgccagtacagggaagtgttcgaggagaaccaggcactaatcaatgaacttaaaaagatactttcacgatgatagcaaaaggaaagagcatatctcatggcacggcagcactggagtacgaccttgccaaagagataaacggggaggcagcagccaccgagatacaccgccatgagcttttcggctgtacaggtgaagagatggtgcaggagatgaaa

SEQ ID NO: 628 - DNA, 4785 bp, Phocaeicola vulgatus; identical to SEQ ID NO: 6
  source 1..4785: mol_type = genomic DNA

SEQ ID NO: 629 - DNA, 2877 bp, Phocaeicola vulgatus
  source 1..2877: mol_type = genomic DNA
aaatagatttttttccgaaagtttcggatctgcattgaggactttctttgtccggtctatatggctgcccaatccgccggctttaccggctgttcctttttcgatgtgaagtactgcgaatcccatttcttttccctattgtttttttggtttagtaatgcaatcaaagagggcggaagccctcccctttcggcttgtccgaaagcccacacttcggaacgaagtatagtgggctatacttccattaacgaaagcgcacaacaaaagtaggcaaaacgcttggaaattccaaatgctttgcctacctttgctgctgaccaaacggtagccgaccgatacgggagagctgctgacattaaaaagccgctggagtgaattgacggattcccgacatctccagcggcttgatgtatgtaagggtagaacggcagggtttgaacctgcaacccctcctctaaaaattgagtgctctgtccagttgagctacgtttacccttagttccttattttgctttttgggcttctttcttgtcttggtggttgaagtaaaccactccgacaatggctattactgaaacaagtccaaacattaccaatgctcccatgtttattctcctttctttttgtctttaacaagccaaagacctgctaaaagggttactactattgacaacgaacctcccacgtatattacccacttttcttgcacatccccgaaaattgaagaaagcacgactgccgtagttatatacttggcaatgtccattagccattttcctaattcttttttcatactgcaaatataataatttaattggaattattgtttatccccctcccgtcccccaaagggggagcgaccaaacggcagcactcactcaatggagtgttgctgttctttagtcctcaaaaggcagttgtggtaaatctccttgttctttcatcacatctattgtacctttcagctttgttgatgtcgtcttatattgtggataattttcattaatgtaagttgttgcgaatgttaccctatcaccgttaaatacgcacatgggatttatgtagtattcaatatccgctctacctcttgctattatttcggcactgcaaagctcgcctaaagctctaaaaatggatacttctgaataccctgtttcttccttgcattcgtccataaaaaacataaagctgtcttgattaggttttagttggccaaggatatatttaaagactttgattgatgcaggctttaaatcaaaaaaagccttgaatcctgctaaaaagaacttcgcaaaactttctgtatctacggctttatttcgtataaatacagaattaccaagaatttccccattaccgtcaactgcttttagaatggctgattcatctttatttgttcccttaactgatttagaaacaagtgcactccctatattaactaatgcttgttttgcaaagggattttctttgttaagctcgaaatctgatagtttacgctttgtcatactctactttcattttcatggtgatttttgatagtaacagtaacattgaatgttattattactttcacaaagatagtaaaaaatgaaagtaatagtttcttttaatgtgttatttatgaaactttcactttcttactatgaaagtcccactttcatagtatgaaagtcgcctatattgattatcaataacttatgctatgtttctttcttaagctcttaaatacccccaaaaatgccattttttagcttattttctttcatcttctgcactttcaaaaattacccaaaaaatgaaactaaaagagccccttcaaaagaggggctctccacgtccacgtttgggtaagttttgcgttttaatgcaaccttaaaatttcagttcttatgaaaaaaaccttctgttgttgaaatgctcatccccaaaatagaaaaacaaccccaaaaaagcaaagagaaacaagggtttaacattgagcaacactccattgagtgagtgctgccgtttggtcgctcccccttgggggacgggagggtgttaaagcgaatagcctttgttatgtctgatatacctttcgggatgcagctttttgtgctgttcctcgataacccctctaagctgtgcattctcttttcgcaagcggtctgccttttcttcggcttgcagcttcgagttctggaagtattttagaactttctggctttgtttctccgcttcgtgcttgtaatgctctctcatttgggtaaaatcctcgtaaatcgccttattttgcttctcagcccatttttcacgcccgattaatggcggtgtgccgatttggggtgctcttgtttcgtaattcagctccatactgttactcggataaatgagccgttcctctatcctgccgtaatactcccttacactgtcatgggtggcggtgctgcctttaatacccctctgaagcccgaatttgttctgcatgacttttccgtaacagtcctgcaactccgacagcttgcgtctgtcacccatgacctctttggcggaaagtctgccgtccacggttaacggcacaacgacacaatgaatgtgcggtgtccgctcgtccatatgtagggtgaagtccacaacgtttctccccccgaaccgttcgctgacgaacctgtagttctcgttcatccattgagtgagcctttcgggattctccccgatagctgtcatttcctcgtgacttcctgtaagaactacattcaggtgggtaacggcatccttgcggatggctgtctttcccttgtaaccctcctgtatgcgtctgttgattctttcctgtaatgaccttcggttcttgaaattgtcatagacatagactttcccattctcgcccaaatggta

SEQ ID NO: 630 - DNA, 2057 bp, Phocaeicola vulgatus
  source 1..2057: mol_type = genomic DNA
ttgtaacataaatcaatgttttcttagtaacataatatttaatctttcttaaatttccaggaaagagacacgtcaacaccaccaaatctaataaccaattcaaatatttaaaagggaaaaagaaacttcgaccttttagcaatactttagaagaatccggaaacttttcattaatcatctgttcaaaacgagtgccttttgcaaaatctacaaatacaagttcacaagttttactcaaaatctcagctacttgcaaagttattttttggcctccaccaaaatttaccttaccggaattctctataattataattcgcctcatatactctttcgataataggattttaagcttatattttaacaaataaagagggtgatatttatattatagcatcatgctatattagaacataattttaaatagttacatcgtatatatcttatattgctttgcataacagtatattacaatcatacagaacgatataaaataggcattaataacgcagtaatgtagacacataaaaaacagagtaatcaacaacataaaattcaatctcttatcataagttttataaaaagatttaagaaaccatagaagtaaaataaaattcacaattcccacttgtgccaacaaacgagcttcaaaacattcacagatatagccatgtattaataatgatttttgataaggaattccaattcctaatagtatattaggaatatcatagtttaaaaaacacaaattatcatttaagacatcattcctagctgagttagagcttattaaagcgatattttggatatcaatcccaataaataaactatagactatcaatacgaatataataacatgatatatccccaatctttttcttgtcattttctgccccaagtatatattcaattttattgcaatcaacaaaaccaacgcacataatagtgctgtcttggcaccagtaagaaaaattgctacaacaaaaagaatgtaccataaattagtgaaatgactatgagaaagtctatttctaatgtactgaaggatgattccgacacaaaaaacgaaaccactcttttgaggctgtaacatcaagccaaaaggcctaattgccattaaaccaagattgtccgattctctcaaatattgagaatcaacatcataagatgccattgccttacccactaaaaaaattccatcataatcacctaaagccaacaaatttatataagtaaattcgtataaggtgaataatatatgcatcttgcaacaccaaagacaaagttttgataatttatcaaaatccaaaggtaatgatgccattacagccaacattatcaagaaaaggaaaaatctataattctcattagcaaacccagcctcatcaaaaccgttgtaacttataaagcttgatattataaaataaataaagaagtatacaacaaatttgcttgcagttggagaccaaatttttttagtaaatttatgttttgcaaatccccatactaccagtccaaatgtcacaatctcaagtattatagatgttgatacataaaaccttaatggagctgctaaaaagatcaacaatactaaaatggaatatatatcaatcttaagtagataagattttatattaagtatcataatgcttattcacaaaaaacaacatttaataaattgtatatacaatatactacttcacacacaaataaaattgtcaaaatagaaaagatttaaaatatgctttcaatgtgaccttaaaaaattagcattcaattttgacatatagctcaaagaaacttgccacaaggcgatttcctaacaaacaacatcaaaaaggatactgatttttatgacttgttgtaagcactcaatttagggcatcccccttcgaaagggcacttttcagtgccctaaaccgagttttgttaattaattagtcttgaatttaacattggctggtagccaaagtgattttgtcaggaaccatgttaacataatccctgcatccgttaaagatatttttgaaaaaagttccgatgaagttccagatagaact

SEQ ID NO: 631 - DNA, 2026 bp, Phocaeicola vulgatus
  source 1..2026: mol_type = genomic DNA
aattctttcattaattgtaatatatgtattaactcaagtaacccaaaaggatgaattgttatatttatccttagcattttgtggtatccctttattgataagtctttattataatgtattactttttcaaactcgttataaagcctatatccctcgtctttcttgtattgataaatcattatataaagaactgttatctttaggatctaaattttttgtgattcaaatagctgctgtaatacaatatcagacgattaattttttaataatgcgttattattcggcctctgatgttacgtgttatagcgtggcatataaatatttcagtattttatctatgatttttacaatatttatagctccgatatgggctgcaacaacggaagcttatgcgaagaaagacttcaaatggattagaaatatagtgcataaatatttgcttatatgggtaggattggcatgtgtcggagcattgatgcttttgttttcaacatatatatataaactttggttgggtcaagatattggcatttcttttaaattatcattggtcgtatatgtatatactttagtatttatgtttgggagtatttttgttaatattttgaatggcatcagtgctttgtatattcaattttggagttctgtattctctccattgttatttatagggttatgcatcttttttatcgaaaatcagattggttttcctgcattgatattagctggttgcttagccaattttaatggatttataattgctcctatacaatactacaagatattttataaagatagaaagggaatatggataagatgaaagaaatgcgaatagtacatataaatttatcaggttccaatggaggagcagctattgctgcgtatagacttcattgtgaaatgagaaagaatgggttggattcaaagatgctggttgcatttcaaggaattcgtagtcgtcaggagggggtctatcagttttcaataaggaaaaaactgcatcataaggtcaatgttatgataaatcaattactttatcctgcaagtaaaataataggtacatattcttttgcttttaatggttgtgatttgtctaaagaaaatgatataagagaggctgattttatttatttacattggattaatatgggaatgctttctatttatgatgtggagagaattttaaaattaggtcgacctgttttttggtttatgcatgatatgtggcctttaactggcgggtgtcaccatgcttttgattgtacaaaatatttagaaaaatgtattgattgtccattacttcatagaaaacgtgatatgttattttgcaaattccaatttgaggaaaaatatagaatttttagtaaatactcaaatttgaaaattattgctccttctacttggctatttcatctagcctcaacaagtcttttgtttaaaaataaacaattgattcacattccgaatctttgtgatataaatatatttaaaccgatgggaaagggttgggccaaaagattatttaatctttcagaaagtaaaaagcttatattatttggggctgctacaggggggatgggaaatatatataaagggtgggaatatttgcaaaaagccattttgcatttatctacttcttcctatgaggctgttatatttggtgagtataataaaacagtagagaaacagttacctattaaatgtaattttatagggaaattatatgatgaatattccctttctgttttgtataatgctgctgatgtttttgtgacgccttccttggcagataactttcctaatacaattttggagtctttgtcatgtggtacaccagttgttgcttttaatgtcggggggatacctgatttaataatgcataaatctaatggctatttagcacattataaagattgtgaggacttgaaaaaaggaatagaatggtgtgtttcacaatattctattcaagaggtttgtaggtcttctattataaaaaaatatagtcctagtttgattatagagaaac

SEQ ID NO: 632 - DNA, 1841 bp, Phocaeicola vulgatus
  source 1..1841: mol_type = genomic DNA
atctaccacagtttcgatattaaaacgtctgcaagtttctagcccctttattgctaatttatttcttcgcatttcatctttcatcaaagactttaaagattctgcaaacatagtagtattaccataagaaatcaacacaccatttacatcattatcaataatatcatgcacagacaaaaatgaatccataacaatcggaactaccccattttgctgcgcctcaattatcgacattggaaatccttcaaatgcagatgtcatagcaaaaatagaagctcgcttataataaggtataggatatcgcctcccctcaaaatgaacattgggaatattattattgcgtgtaaaatctaagtaaaaggatttatccttaccatcacctacaatatataaatgccattcattaaattctttatctaattgaatatgcttccatatcgtcaataatttcgatatttttttatttgattctaacaatcttccaacaaataaaacctctttcctctttttacaaatttcatccatagaaataaaattatcaaaaaccaaaggattataacaccagtccaatttttcaaccgattttggatttctcaattgtatatattggtctttaaactgaggcgaaagaaataatactttatcactaaagattaacaatttatctataacagataattgtctttctttttcaaagaaacggtatagcagaaaaaagacacgcttcaaaattgatttcaaacaaaaaccttctatcacactacgagtataaagagccgtatgatgaacagaaattattttcgcattaaaaaaacttcgtaatggagataaaaaaacaacaggccaccattgattgattataaaatcaaaactattctgctgatacaattttaaagcgatagtaatcttaataccatcatcactatcataagtatattcatcacacctcacatccggtattcttaccgccttgatagaaggatcaatatagggcaattcatttgtttcagaatccttaaaataaaagactgtaacagcatgccctctcttcgccatctcattagctaaacaaatagttactgtttcacctcctccataaataggccaaagtcgcaataaaaatacaatattcatatttacaaataatcagtttaacaatgtattcaaaaaagaattcactgtatttagtttcaaatactcttgaccatctatggtcataagcttgtttagcaggcaagactctaaaaaagttttaatacccaatatttccacatcactacttatatatcctaatttcgatttccgaactattttacccaacatatttgagctaggagaaaaaactggaacattaaactgtgctgcatatcctaatactccactactttgtgaattattcaaataaggaattaaaaggacattcgatgatttacatatagcagatatttcctcataagaacaaaaataatcctttattatcagccgatatttctcactacattctgctgccagtctataaaactcatcctttatatccaaatctatttttcctgcaaaaacaaagacaaattgatttctatcaacaacagacatttcttttatcgctttcaatatgttaagtgttccttttctttcagataagactccaatatgagaaagcacaatagcatcttcttttacagcattatcttttctaaaatccggcaaagttagtgtaatggaaacataaggatcagatatacgatcaaacttcattgtctgatatttacgattaaaaaatgcagcagaagatgaatcattacaaatacatattttcttgattgacttgttatgagccatct

SEQ ID NO: 633 - DNA, 1538 bp, Phocaeicola vulgatus
  source 1..1538: mol_type = genomic DNA
ccttaattccgcaacactattacaaatataactttttaagtacctgagcaacaaaaagttgctcaggaatttgccatgtcagatttttcacctatcttagtgttgcaaatcaaaatatgtatcaaacccgacagacatggcaaaggtagcaattaaatccgagaaactcactccttttggaggaatattttcaataatggagcaatttgactccagactctcatctgtaatcgactcaaccctcggtatgagatgcaggctgtatggttatcaatacagcgaaatcatccgttcgcttatgagcgtttatttttgtggcggctcatgcatcgaggatgtcaccactcatctgatgtaccacctttcgcttcatccgacacttcgcacatgcagtgccgacacgattcttagagccataaaggaactgacccaggataacatttcctacacatccgacactggcaagacctacgacttcaacacggcagacaagctgaatacactgctcctcaattgcctattgtccacagggcagctgaaagagggcgaggggtatgacgttgacttcgaccaccagttcatagaggctgagaagtttgatgcgaagcctacatacaagaagttccttggttatcgccctggcgtggcggttattggcaacttgattgtcggcattgagaacagcgacggcaacacaaatgtccgtttccaccagaaggacacgctgaagaggttctttgaaaggtttgaacaaaacaagcttattatcaaccgtttcagagctgattgcggctcgtgttctgaagagatagtggaagagattgctaaacactgcaagaccttctatatccgtgctaaccgatgcagttcgctctacaatgacatctttgccctcagaggttggaagaaagtggaattgggcggcattgagtttgagctggcctccattctcatcgagaaatggaaagggaaggcataccgtcttgtgattcaaagacagaagcggatagacggcgaactcgacctgtgggaaggagaatacacctaccgctgcatccttacaaatgactacgagtcttccgagaaagagattgtcgaattctataacctccgtggagggaaggaacgcatcttcgatgatatgaataacggattcggctggaacaggcttccaaaatcctttatgggagaaaacacggtgtttcttctgcttatggcactcatacgcaacttctataaattcatcatggcgaggcttgacgtgaagaggttcggactcaaagcaacaagccgcatcaagacgtttgtctttaagttcatctctgtgccagccaaatgggtcaggacatcaaggaagtatgtgctgaatatctattcatgcaacaatgcttatgccaatgtgttccagaatgactttggataacaccgacaacttatagtcgtgattttgcgtattgcctcaagtcgcatggtggggtaaggggcatttatatgtctttatggtgacattcgatgcactgtgccccctttttactaac

SEQ ID NO: 634 - DNA, 1464 bp, Phocaeicola vulgatus
  source 1..1464: mol_type = genomic DNA
aacagacttgaattctttctgtctttcatactttaattattaagttaaacaaaagttagttttctattctctcaggagaaataggtctcctacctgtgaaaaagtgttgcaaatatatgcgcgaatattaaaaaagccaatgtaggattgtacaaaagcatggaattttccgtcttttcaactgaaaaatagtacaaacttctgtgaacaatctcaaaatggatagtttcaagagcatttttgttatacaagagtgcttttatttctgattgttactttaatattgtattgtaaaacgtataaactaaaatttgaatatggctaatctttcaatagtaattgtacctgctaaaaaattatctaacggtagacatagagtcaggatcgcagtggctcatcgttcacaaacgagatatatttcaacccaattcattttggattctgcaaatcaaatgaaaaatggacgagtagtaaaacatgaaaatgcagctaatataaatgcttgtttgcgcaagttgattaatgaatacgaagagattctttcgtctattcattatcagtcgaatatttcatgcactgaattgatacatgttataactcgggaacaacaaaaaaaaggaataacctttaatacggtagtgaaagaatatctttcaatgatggaagcagacgatcgtaaaaaatcacataaattatataatatagcttgtgcaaagttccttaaacatatgaaaggtgattttcctttggtacaactcagtccgacacatatacaaagtttcgctgatgtaatgaaggctgaaggattaaaagaaacttctatcagaatttacctcactttaataaaagtaatattgaactatgctaggaaaatgaattatgtaacttatttagttcatccttttgttttatttaaaatgccagttagtaatatcagagaactagatctgtccgttgatgaattaaaaaaaatacgtgatgtgaaattattcaagtctgtgcatatcatggctcgagatatatttatgttaacttattatttaggtggcattaatctaagagacctaatggagtatgatttcactaaagggaactgtatgagatatataagacataaaacccgtaatagcaaaaaaaatgaaaatgaaatagctttcactatccagccagaagcacagacaattattgaacgatatatttctgaaaatgggaaattagtttttggcaaatatgaatcttatgaaaaagtatatagtttggtctttagacatatagggaaggtgactgatctggcaggcataaatagaaaggtttcatattattctgcaagaaaaacatttgcacaacatggttatgatataggtatcgaaatagaaaaaatagaatattgtattggtcatagtatgaaaaataatcgtcctatatttaattatatacgaataatgcaagagcacgccgataaag

SEQ ID NO: 635 - DNA, 153 bp, Phocaeicola vulgatus
  source 1..153: mol_type = genomic DNA
tggatgatggtgaattaccgatagacaacaacctggctgagcgaaccattcgaaagctgaccactcaacgcaacaattcacttcattatggtagtgatgccggtgcagagatggcagcaacttatcacagtgtgataggaacggtaaagcttc

SEQ ID NO: 636 - DNA, 5066780 bp, Parabacteroides merdae (residues 1-1,688,927 of 5,066,780)
  source 1..5066780: mol_type = genomic DNA
tgttctattatatactggaaagtttattgccaatcaccaaaactacaatctttagcacttgctcagtttttatgcctgataagtttactgtttatatatattgcttttgacttttatccgtttaaacatcctgcacatatttttgatttggatttctttaggagttcattttcttttataaagaaaagcacagatatggttttgacttaccattctgttggaatacctgcaatgatggggattgctttgattttaagttcttttgaactatctaaactacgaaaaaggaatgttgtaacactattgctacctcttataattttattattgatagcacaagcacggcaggcaatatttggaactttcataatcttgtttatccgcttgattatagataccagaatatcacttgataaaaaaatttggttttctgtaatattggcttttgcttctttacttattcttacaaatctaaagtctaaagctattgagggttctatgaatgcaactacgcttagccaaagtcttaatagagactatgataatgctttcaagatattagagacagacttcattttaggaaaagggttgggtggctttagtacaaacggagccagagcatatccacataatctgtttctggaattattttgcgaattgggtatggttggaactcttttgattgttatgattgtatttgtgccattagtggtaaaaccagatcgatttcgtttattgactatatccaacttttatgctcttcctttaatagtagccatatttattaggtcgatgatgagttctgatctaattgacagtatcactctcattacagcgattatagtaatatcaaaaactcaaacaaactaattatgatgaaaaagctaatctatatagcaggtggaaatgtttctgttttggagtcccaagtattggaactgcttaagttttatcacatcaaaggtattcctttggcattgataatgggatatcgtaataccaacgaaaaaggggaaattgaaaagaaactatccaattattcatttttggatgtcgtatggtttaaatcatatcctacatatcaaatattcgaatttctgactatccgaaatattttttcggctgtaaagaaagtaaaagattgggaaaattcattttttcatgtaagaagcgagcatcttggctaccttataaaaaaaatggttatagatcaaagacttaataatcgaattttaatcgatatcaggggggtagtttatcgggaaatcgaatttaagtatatgcggtgttccggtattcgcaagttattgctgaaagttcaagctaattattatcaatttttctacaaaagactgtttgacagtagaatcgttagccaaattgtcatttcttcagtttcaacaccaatcaatgagtatatccggaaaaactattcaaattgtaaatacagattatgtgttcaccccaatattgcaggaaaagtgatggaattctctgtttcctatagaaatgaaataaggaacagatatgatattaaagataatgaattgcttgcaatttgcctaagtggaggagattcgctttggcaacaagataaaagcaacatcgacaccctaatatctaaaggcattagggttatctccttatctaaaaaggtttttgacaatgagaagtgcattagccttttcgtgccattccaagacgttccaaaatatctttccgcagctgacataggaatactttggagagatagaacatttataaattattctgcctcaccatctaaattaagtgaattcgctgcttccggattatttataatccataacggaagtgtcaatattgcagaagaatatattgaaaaatatggcgcaggggtgattatagaagatatgagtaatttaaataccaatcaaatagaactgatcaaacagcaaaacagaatcaaaaatgcaatatcagggcaaaatatgtttggtgtaaatgctataggaaactcatacatcaacctttataaaactttttaaaaatcaagaataatgattcgtccattatattttcacaatccaaatcaggaagggtttgaggcaattattaaacatttacattcaaagaactataaattcatcagtattgaagaactttatagccgattggaaaagaatgataccaaaggaaaattggcatatatatcattcgatgatggctggcaaggtaatttaaagttgattccaattatagagaagtacaatgttcatataacaatatttattgccgttaatccgataatgtcaggcaacttttggtgggaattcgttgcaaaaaaagttggttatacacaaatgcaaaattttaaaaatcttccccacgatgagtttgaaagtcaacttaaaaaaataaaaacagaagttgctgatttacaacgatcagcaatgacgattgatgagcttgagacgattacaaaacaccctttgatatcaattcagtcacatactataaatcatccgattcttaccaaattgccagatgatctgttggattttgaacttagtgaatctcaaaaacaattagaaaaaatcacgggtaagagcattttcgcttttagctatcccaacgggtccatttctcatagagaaatcaacgctgcaaaaaaatattataaaattgcattttcaacaaagccgaataatatctcggcaagtgcagatttgtataccttaccacgctatgcactgacaggtgattatatgcgtgatttgcttaagatgtatggcatctggaaatatataaagggatgttgtgaaaaaatcacaagaactttcaaagcttaaattataacatatacataccaagcaatgaaaattttagtcaatactcccagtttgaaattaatgggaggaattgcgaatcattacaaaggattgcgtgctttttggacggaaaatgtaatatacaatactatagggaaccgcctagtgacgggttttgaactatacgtcaaaattggacactaatgaatatacgggctttaaaaaacaagactaaaacttatcttgccggagactggtctggtgataaggctgccattgataaattgcacgaatggaatgagggaaatcgttggagtcttcatttcattgatgtacacaacttgacacaatctagagataacagtaacaactgcaatataaaagcttcactgagaatgagaatgggaatttcaaagactttcgttcttattattggtgaacatactaaatctctgaggagtggtgcttgttatttatgtaaatggtatagggaaaattcttgtttgttgagacattctgtagataatcgtagttatgtggactatgagtgcgatatggcgattaaagaaaatgctaagattgtgatactttataattctatcattgtagaccgaaacaaatgtccagaagtgctacggaacaaaggaatccataagcctatgaagaaatttaactttaatacttggaatgtggagtgggattatcagactgtgaaatctgcaatcaatgattaatgatatgcttaataatgtaaaaatatttatgctgagtaactacaatttctttcttaagcaagtagcgttggcaatgggtaccatttcttgtatcctgacaatctttatcggtatatggccacgatttaattgcagttgtatgtgggggcgttgcctatttgcttctattgcttggggcttcagttcaataataccaggaaaagaaattaggatagattttattcgcagacgtagaattcgtgtgaaggtgggtgatctatttgatacagaacgtggaagtatcgtggtcattccggtgaataactatttggacactcagttgcaacatgatgtgataggtccgcatactgttcatggactgtttatacagcattatcgtgataaatatccgagaaagaatttagatgatgaaataaccaatgcaatatcaagagatggtatcctctcatcgggaagcgttgcgtctcgtagaaatgtaagtggcaaacttgataaatatccgttaggaacagttgtccgtttgtttgaggaagacaaacagtactatcttgtggtggcgacagagtttgatgaaaacaaccatgtaatttatcagccagagaaatatacttatatgctgcttactatgatggagaagataaacacctataatagcggtcatcctatctatatgcctattattggttccggacagaccgggctaaatctttccaaacaaaaaacattatgtcatattttgcaatgtttcagtttggtggaccattatgtaactatgggtggaactaccattgtagttcataaaagtgatacgaaatttatatccttaaataagataaagtatgagtttaacaatttaggaacataaaatatgggaacttatagaaatggcacatacgtggcctttgatggacagggagaagtaaatcctgtcaatagcgacttgcataattttgaattgctaaaagcatggcaaacaaatgacaatgttcgttttaattttgtaaatagtcatgagaaaacttatagtgtgagagactcaagtagtttggaaacattgaaagcgaaattgaaagaacgaatggctaattctaagaatatgttggttatagtttcttctcaaacaaataaaaacagagggttgttgaattgggagatacagcaagctgttgaagtttataaattaccgattatcgtggcgtatgtaggtttacagtctttaaatagttttagtctaaacctttactataactggttaccttctaagttgcgtgagtacgttaataacaacactgcaaaagtggcacataccccctttacacaattcaagattggaggagcaattaattactattctgtagtaactccaacgatgcctataaatagcatggagatatattgatataaacattctgtttgtcatgaaaattctaataaatacaccctccttaaaattaatgggcggagttgcaagtcattacaaaggattgcgtgctttttggacggaaaatgtaatgtataatactatcggaaaacgtaatgcaacaaaatgtggcagtggaaaatattggttactttgggactgtttgaaatttatattccggttgttgacatttcgtccggatgtcgtattagttaatccatctttaggaacttctgcattaaaacgtgatttttttttcttaaatgttgctcatgcccttggctttaaggtagtcgtgtttattcatggttttaattgggattatgcgaagactatcaataagaaatgggtggtacgtcattttaataaagcctcactgatttttgtgttggcaaatgcctttaaagaggaaatgaagtcatggggggttacttcgccaataagtcttacaacaactaaagttgatgatgccttgctcgaaaatttcaaccctatgaaggataagactttcagcaacaaaaacatcttgttcttgtcaagaatagaaaaagcaaaaggagtttatgaagcggtagatgcctttgccattttaaaacaaaagtacagcgacttgactctgactttcgttggtgatggatcggaacttaaacctctgaaaaaatatgttgctgacaaagatttgtctgatgtaatatttacgggcagattggcaggtgaagcccttaagaatgagtataaaaacgcattattattattattaacgactcatggagaaggaatgccaacggtagttcttgaagcaatggctttcggcttgccgatcttgacaaggaatgtcggcggtcttgttgactttttcaaaaacgacaaaatgggatttataacggactcccttgaaccgaaagattttgccgacgcaatggttccgtacataaaggacaaggagttggcacgaaaggtcggcgcatataacgcacaatacgccaaagaacattttatggcgtcaagcgttgcaaggcaaattgaaaacacaataaaagaaactataaaactatgaaactgtcaagaattaagaaacttatcttccttcatttgcagcatttgccaatgatgtcaagaggttggagaccaacgctttgcaaatgggggggggtaaacatcaaatgccctaaaaagaccttcatcggagaggacgttattttcgacacaaattatcctgaggatattgtcattgaagagggcgtgcgtctggctgtcggcgtccggattgtaacgcatttcatgaacccgaagacaggcagttatgaccgcggtcaagtgcatgttggcaaaggagcctacattggcatgggaacaatggttgtcaagccggtcacaatcggagaaggggcaatcgtaggcgccggggcaatagtgacaaaagatataccgccaaacgaagtatgggcaggaaaccccgcccgctttatcagaaaacgataaaattatgccaaacgcaatatttttttacagaatacagaggtggttatacttacaccacattccatttttatcctaaattaattcaactattaatttttctgatttacaacactaaaattactgctgattcaaaaatcggtaaaggaactttattttgtttgtaaaggaattagcactgtactaatcccaggaacggaaattggagaaaactgcgtattaggtttacgattctcaacagtaagaaaatttccatataaaaacacgttcctaaaattggcaataacgtttttatcggtccaaacgttgtaatctgtggaccagtagaaattggtgataactgtattgttacagctaattcgtttgttgacaaatcattaagggaaggtgtaattgttgcaggctctcctgctaaaataatcggatatactaaagacttaaactataatattccttcaaatcaataagaattagatggaatagcaccatatctgtagccaaaagagtaaatcaaaagttgcaatcggatatggttttaaaaggacaaaactatgttgaatgcaatctatttttatcgggtatcaagatggctgtacttgcaccacattcctgtactgccaaaattgataacattgcttattttcctaatctacaacagcaagattccataccaggcaaagattggcagagagtcaacttttggatacggaggtatgggtgttgttatccattctaaatcaattataggggaaaactgtactatatgtcagcaagttaccatagggggaggtaattcaagatttccaggagtaccagtgataggtaataatgtttatattgcgaaaggttctatcgttatgggtggtataacaatcggaaacaatgttacaataggagcaaacgcagtcgtaaccaaaccagttcccgataatgctatcgttgcaggcgtacccgccaaaattctaaggattaaagaataacataatatgcataaagttatcaactcttttcgcttgctgaaggagtattgcgagaatgaggggttcaagggttgggatccctatgacggacttaactcgaaggtttttcaggcgttgccgttcctgaagaagtcggcaatctgccgcctagttgttatccaaggatttaagcgctgcccagtcaatctccgcaggcttgcgcttgtccccaaggaatataatgccaagggcatcgggcttttcctttccggttactgcaacctatataatgcggttaaggcaaaccccaaacttgcggaaagcctcggctctcccgattccctgaaatcacggattaacgaactggctgaactgttgatctctctacaatcaaaaggttacagcggtgcttgctggggatataactttgactggcaggctcgcagacttttccttttcccaaagtttactccaaccgttgttgcgagcaatttctgtgcaaccgctcttatggaagcatacgaaattaccagagagaaaaggtttcttgaaatcgctctcagtgcggcacatttcgttatcaacgaccttcaccgcacggaatataaggacggattcctattctcttacagcccgttgcagggaaacgacactgtctttaacgcctcactgctcggctcaaggctgcttagtttttgctacaagtacacaggcaacgaggaatactgcgaacttgcagagcaaagcataaaggcatgctgctcaggtcaaaagccaaacggtgcatgggtatatggcatgctacccgttcagagttgggttgacagttttcatacaggctataaccttgatgcgcttattgcatatcaggagctgacaggcgacaataagtatcgcaaatatattgagaagggctttgaatattatattcaaaacttctttgaagccaacggaatgccaaaatactacgacaaccgcacttatcccatcgacattcactgcccggggcaattgctcgtaacgctcgcaaggttgcacaagatcgaagaatacaaggaaattgcagaaaaggtcattgattggactatccgcaatatgcaagaccggaaaggctatttctactaccagttaaagccggggataagttcaaaaatatcatatatgcgttggagcaatgcgtttatgtttaatgctatgagccattatttacttgccgaataatattttaatcttatggataaagtttcattaaacggggtcgaaatattccctttcgactccgaacagcaactattgcattatgtggacacgcataagggcatattggtagcgatcaatgcagaaaagatattgcatgccacggaacagacacgtgccattatcaatcgaaatattgggtattgtgatggagccggtgcacaaatggctttaaagcagaaaggttataaagatgcctgtaagattcccggatgtgaactatggctaaagattattactcgcttttacaaggaaaagacattctatctggttggtggaaaaccgcaaatcgtaaatgagaccgtagagaaactgtgttctgaatatcaggatatccgaatagtgggttatcgtaacggctatatcaagacggatgaagagaaacgacgattgatagacgatattgtggagaagaaaccggatgtggtattcgtggctatggggtcgccaaagcaggaattgctgatggaggagatacagcaacggcatcgcgctatcttccaaggcttgggtggcagtttcgatgtctatacaggtcatgtgcagcgcgcaccgaaatggtgggtggagcataatctggaatttgcttatcgcttgataaaagaacccaaaagaattaaacgtcagatccacttggtgaagtatgcttggtggctgatgaagaaaaaattataaacagaggaaatatgaagaaagtgatgttggtcttcggcacccgtccggaggcaatcaagatggctccgctggtgaaagaattccagaaacagccaaaacgggtagagactgtggtgtgcgtaaccggacagcatcgggaaatgctggatcaggtgttgaagatattcgacatcaaaccggattatgatttgaatatcatgaagcagggacaggatctgtatgatgtgaccgctcgtgtgctgaccggtatgcgtgatgtactgaaagaggtaaagcccgatgtggtattggtacatggggatactaccacttctacagttgcagctttggctgctttttatcaacagataccggtgggacatgtggaagctggtttgcgtacacataatatttatagcccatggccggaggagatgaatcggttgttgacgggacgtctggcgacctatcatttttctcccactccgttaagtcgtaataatctgattaaagagagcgttgatgaccgcaatatcattgtaactggcaacacagtgattgatgcgctttattgggtagtagataaaatcaagaacaacaaggagctagataatgaattggaagatatattgagcaaagcgggttatgatgtaaaccgcttgaacaatggcaagaagctggtattgattacggggcatcgtcgtgagaattttggtgacggatttatcaatatgtgtacagctattaaagatttgacggttaaatatccagatttggattttgtttatcctatgcacttgaatcctaatgtgcgcaagccgattcatgaggtgttcggggagaatctgtccggcttaaaaaatatgttcttcattgaaccattggagtatttgagttttgtgtatctaatggagaagagcagcatcgtattgacagatagcggtggcattcaagaggaagctccgggactgggtaaaccggtattggtgatgcgtgataccacggagcgaccagaagcattagatgccggaacggtgaaactggtaggtacggactataataagattgtaaacgaagtatcatctttgattgatgataaagcagcttatgaaaaaatgagtaaggctgtaaatccgtacggtgacggattagcctgcggacgtattgtaaatgcattgttatatagaatataagctgagctatgaagctgatactgaaaaaatatttttacaaatcgaaatacttgttattacttatggtttgcattaccaagagctaataaacttaaagtgaaagttttttctggagttgaacttcattatcgggacttgtttcatggtaagatatacgaattgttgcaaaacctaacatcgggtataaaatgaagaatgataaacgaaaaaaggaaatttttcggtggatattcctcggaggacttttgttgtttgtgacttttcctgttattacgcagtaaatacaagaatgagtggattgatttatgtgccgagcacggacatagatgatggaggaaaaactcgcataggtggtcactttttcagaaaagagttcctgcccgatgtcagcttgaattcgttaggaaagtggatgtatcatacaggcaatcattttttgagcatcattcctttttcatagattgagctggaattatttgtactatacagaaaaaattaaaagacagcaatatagataatatggattttgatcacaagaattgatatttatctaaaagaatcaggcctatcaaagaaaacgaatgatgatcatgtattgctattggaagtaatgatcacattacgacgagtgacaaggtgaaaagagatgattggccggatagtagaagaaccatattgcggaactattatgttgctgccactaaatatacgaaaaaaaaacatatcataggtttctatgtcacctaccgaaaatgaaaacgtgattacaattaaatggaatggagtggcagactgtatgacttatcagtcctctttgcaaaacgggaaatattcttcggaaggtatatgcttttacatcaacctactgtaaaatactaatcaagaaaataataaggatgcctacagtcgttgtccgttttgagacttgtaagaaagccatagggtacggtacggtttattaccgtatctacaaaggacataaccgacgtatggaattttcttcccaccttcacctaccaacttcttcttgggatgaaaccacaaagacaatccggggagagcatcccaaagcctgtctctttcgtgctcagatggaagcggatcttcggcttttgaaccggattataacggaagatgttaccggtcgactgacaatgggcgatatgatagccctctttaaacagcaaaggacaataatcaaatgaacttttgacttgtaagtaaataggatggtaccgtctttgacagattgctatcaccgtctaggttttcaggtaacagaatccgaagatggattacggataggcttcaaaccgggaatggcacatgctatcgtgaaggagatttggaacgagcagcctttgacccgttcggatgttgaaaggttttatgaaaagctttcttcactgaacaaaggatatcgaaatctctatttcaggatcgtggcgcacggtggattcctgccggaggcattggactttgaactgcacgggctgaccgtttcggatgaaagctatattgaaagcctcttgtccggaagacatgtggagctttatccgcataacgaagcggcttacagggcgatcatacggggattcaaacaacaccgtatcggtgcggtcgtgcaggctaccggaacagggaaatcctatttgctggcacgctatatcgcagatcatgcaaaggaaaatatattggtctttgctccgaacatcacgattctggatgagatccggaaagccgtcggattctccattccgcaagtgacgtaccggacattccagtcactgattcgtaaccgggaggacaatgggttgttacgggcagatcatattcttattgatgaattccatcatttcggggcggaaatttggggaagtgccttgcaggaagtgatagaaaacaatccctgtgcctatgtcctgggaacatcggcaacgccaatccgtccggaaggaatgatcgatacggtggatctttatttcgaaggaaatttgttttatgaacttaccttgccgcaagcttggtattacaatatcttaccagtgccgatcctggtacaaagtgcttacgggctggacaacgaactggatcggctgcaaagaaaactggaacgcagcggttgttcagtccgccggagagagcgcatccaaaagaaactggacctggcgcgggtcgatttcaaaggtgctttgggtgcgtcgtcggtgatccggaagttcctacccgaaagcgtacgcaaactgctggttttctgtcgcgacctggccgatctcagacagatggtgccggaagtgtgcgactggctcacacaggcaggccgatcgattacgccatttgaaatccatcatgcgcaaagcgagcaggagaatcagcggctgttggccgctttccgagaagagtcggaccggttacacgtactcttttccgtcaatatgctgatcgaaggattgcatgtcgagggagtggatgccgtcttgttcctgcggcgcaccgaatcttacattgtcaccctgcaacagctggggcgctgtctggatgccggaagcgggaaacagccggtcgtcttggatttcgtgaataacctgtcgggtaaatcggtctacgacgtgatggcgtgccactgggagcgactctcttatcttccatcgccccacggatttgaaggaacaacctcgttcctcgctaccggctatttgtcggatatccggctccgcatcgaagagatcctggccgagctggaaccatggcagattatgtacgagcggctggtcgagttccaccgggaagagaacgactggccttcagtgacggaagggaaactgggcctttggtgcaacacgcaacgcatcgcctacaaacgaggctgtcttgccaaggaacggtgcgaccagcttgatgcaatcggttttgagtggaatcagctcgactccaaatggatgagggaataccatgcattgaaagtcttctttgatacctgcggacgctggcccaaacgtgaagacggcccgcttgcgacctggtgttatacccagcgggaaagacggaaggatggacgtttgagcaaagagcgcatccgggctttgaatgagatcggctttgtctggaatcagaacctccagggggaatggatgaagaactacgaggagctgaagtcttttgtcagaaaatatcggcgtttccctaaatcgacggaagggaatttgggcggatggtgccatacacaacggaaaatgcgtaaacagggaaagttacccaatgaccgccggctcctgttggataaaataggatttgtctggtcggcggaacaggtctggcaaggcaacttcgaacaattgtgcctgttccataacctgcaaggacgatggccgggatgccgtgaaggagcattgggacgctggtgtaccattcaaagacgggattaccgcaaggggaacatgtcagacgagcgaaaagcacaattggaaagaatcggtttccctcttgcctgatatggaatatattcgattctatccgttatgaaagttgtctattcaattataatcaacattggaacagtgtctgtcattacccgaacttggaactgccagcatacgggtggaaccaactgataaaaccggaataagaccaatctcataaagtaaatcgttattgattcatcccaatatggaagcccttgtctgaagccggttatcggagaagacaggggcttcttctatattttataaatgaattatagataactattacactggcttgacgaatccgttacaaatccttggtggtttaaagtgagtgtttacgtaaaatgaaaatatttatggtagcaaggaaagcttcattacagcataaggttcttttagggtatatgatattgatcatggctgtttgcggcatggtttccatcttgttatacgaacggagccgcatgcgtgagataaaaacggaaacatcggagatacgcaggatacgccatgacatcagtacggcgcatcgctatatcacggagcttgccacctatggagagtccgtcattgtctgggagaataccgattttcgtgagtatcgcagaaaacgcttgcaaacggacagcttgttacaaatattgaaagtgagttgtggcacgttcgtcctgccaaagcagatagactccctatgtcatttattggaagctaaggagatacatctgctccgcattatggagaccattaccagacagggggaagcggacagcctgctcgcaaatcgtctgcctattgttatcagggaagcggttcgtacccggacagtaacccaaaagaaaaaagggattgccggttggttcggagggaaaaggagcgtacaggtcttcgagccatcgaaaggactgcaagatttgaatgagaagctgatcgccatgcaagaggaacgtgaacgccggatagacatgtataccgacagtctgcgcatacagaataaggccttgaaccggaagttgcaaatactcatcacccatcttgacgggcaagcgcaggcggcgttcatcagtcgtgaggaaaaaatcacggaagccggagatttttctttcaaactgtttgtcttggtaatcgtctctgcttcctccttgctattcatctcgttcctgatcatacggcatgacatcaggaaagaaagggaagggcgggcacagctccaaaggataaaccgtgagaacgaggaactgctcggtatgcgtaaacagatcatcctgaccatctcgcacgatatacgaggaccattgggtaatatcaacaactgcgtggaactggcctcggaaacccgtgaaaagaaaaaacgggaaggctatctggagaacatccgccattcctgccgccatatactgaatctggtgaacaacctgatggatgtttataagatcaatgagaccaaggatacccgtaacgaggttcctttccgtctaaacaacttgcttgacaacatatcgaaggaatatgcccgcaaagcgggtggccgggccttgctgttcgagcaccggcataagaatgtcggtgatattacagtgagaggagacgcagacaaattggaacaaatattggacaatctgctgacaaacgccatcaagttcaccctgtcgggtacgatccgtttccataccgagtacatggcgggaagattatatgtggaggtcggtgataccggtatcggtatggacgaggagacattggaacgtgtcttccgtccgttcgagcgtgcggcgcaggagataaactcggaaggtttcggtcttgggctttttatcacgaaagctcttgtaaaggtactggacggaagcattgaagtagagagccgaccaggtaaaggtacaacattccgcctgtcgtttcccctttcggaaacgacaggagaaccggaaacagaggagcttccggtacaatctgcgacgatacttcccaaacatgtactggtagtggatgatgacagcatccttctgaaaataacggaagacatgctcgggcgcaacggggtggaatgcacgacctgtcaaaatgcaaaagaagccattctagcactcgaccgcttggattatgatttggtattgacagatatacagatgcccgtgaccgatggtttcggcttgttgagattactgcgtaactcggatatcggaaattcccgtaccgttccggtcgctgtcatgacggcacggggggacggggactcgggcgtgtatatgaagtccggtttttgcggttgcatacataagcctttctcttcaaaaggactgctggcctttatctcctccgttacggagggcagaagtgcaggcatgtctccgttcgactattcccgcctgatggaaagtacggacgaccgtcgtcatatgttcggtcttgtcgcaaaagagtcagaaaaggatcttgccgaactggaggaggctttaagagaaaacgatcgggaagccatgcggaggatcgtacatcggatggctccggtctgggagttgttaggggccaacgatgtactgttcggttatcggaagctcctgtatgacaagacctcgagcgacgagacggtcagagagtacacgatgagaattatgaaacagatacggttactgatagacgaagtaaataatgaattaagaaagaaaaatgacggggatgaaaaagactttattgatcgtggaggacaacctgattctttgcgatattcttgagagatggctacagaaagccggttacagggtattgacggccatagatgagccttcggcacgccggaaaatcaaggggaataacgtggcgctggtactgacggatgtccgccttcccgaaggggatggcatcagtttactggaatggagcatctcccaagggttacatatcccttttgtggtgatgaccgaacatgcctccattgcagatgcggtgcgtgccgtcaaattgggcgcaaaggactacttgcccaagcctgtccacgaggagttactgatggaactgttacggggattgatcggtctgccagtttccgttcccccgaagaaatcattaatgaaaaggcttagcggagcggtccgggagaccgagcggatagcttgtcgtgtggctcctttgaattgttccgtcatgatccttggaccgaacggtagcggaaaagaatctgtcgcacagctgatccaacagcatagcggacgtaaggacaagccttttgtggcggtgaactgtggttgtatccggggggaacttgccgcatctgagttcttcggccacgtgcagggggcatttaccgatgcgaaaaaggatactgccggctattttgagacggccaagggcggtacgctcttccttgacgagatcggaaacatgcctcccgaaatgcagacactgctgctcagggtattacaggaaagagtgtattgcccagtgggcagccgcaaagaacttgaagccgatgtacggatattgtcggccaccaacgaggatatggagcgtgccatacgggagggacgtttccgggaggatctgtactaccgtctcgccgagtttgagatacgccagccctctctctccgaatgcccggaagatatattgccactggctgacttctttcgtgagcaacattcagaagagatacgtgtggagacctccggttttaccgaacaagccaaaatctccatgctttcccactcatggccgggcaatgtgcgtgaacttgacaaccggataagacgtgctgtcctgttggcggtatctccattgttaacccataaagatctgaatcttaatgcgaccatctgtaggacaggcgaaaaatgtaaaaaaggcttgatggaagaagcagaagagaaagaactaataaggaagattctggaagaatgtggaggtaagatcagtcgtgtggcgagaatgttggggatgagccgtccgacgctatacaagaaaatggaaaggtatgggttgagatagcatcttcatccgtttcgtttatacataagccggcagattccgttggagaaagttttgcagccaagaagtttccagcgggcagaccggaattctcccgtcaaggggattccaccaccataagaaagaggcagcagaaaaagtactgtctcatccactagattataccgaaaaagtccatcggcatattccgcacttcccccatctcccactcctgccagataaatacaatccttgtcatgcttttcctttacattcagcaagtccatcaaaccgtaatgggggtagatgtggaatgtggcctgtcgctgccagcgtgggaaaccataccgtttgttttccctcacccatcgcataagcatctcgtcttcatgcggaaggaacccgtccaaagtgagtgccatgataacttgaatttttgccatacctcttgttaaaaaagcatgaaacccatgcttatttcgaacagaggctctgacaaagcccaacacagaaacccgcatgggctcatgctataaggtatagcataagcctcacgcaatagcctctgtgcttttgaatttgtcagattcctgttcgagacgtcttgcgacttatgtataataatggcggtcccaattgtcgagaccggccttatctctctatttcaagtttcaaatatacggtatctttttcaataatccgatcagtcggggtataatttcttcaattacccctctatttgtcatgatttgtcggggttctttcctttttcatcttccagacccagtcgtttacggagttcagggtcatttttgatgcgacgcatctcctcattgataatagcctgcgcatccgccttgatctggtcgtaattgcgttgtatctgttgcatcatgatgtcattaccgttcctatccttgaagtcgttgatgagcggaattttctgataagccttttcttccgcgctgatcttggtatggtctacgacaatttcggcatgaaatattttttgctctatcctctcatcaaaattatccgccactgccccgacaaacgtgccttgtgagaggttggcgatctttgatgcgggaatgagtgagtctagctgtgtgttgatggatgtggatacatcctgacggttgatggatacggactgacgttgctgaagcaccttgccgaagcgctctgaaagcgtttttgcggtttctccgaccacctgtccgctgaaaatattccccaccgtgttctggatgaccttggattctttttctccgtagtcacgtgtcaattgactgaaatcctgaaaacccagaagcacgcccaccttgttgcttctcgccgtcgcgatcaagttgtcaagcccacggaaatagatggtgggaagctcgtcaatgataacagcgcatttaagctgttttttcttgttgataagcttgacgatacgggaattatataatccgagcgctgccgaataaatgttctgcctgtccggattgttgcccacgcagagcagtttgggttctttcggattgttgatatccaatgaaaaatcattaccggtcatcacccagtagagttgtggggagatcatgcgcgtaaggggtattttagccgaggctatctggccttggagctggtcctgggcatttcccttccatgcgtccatgaagggagaaaggtagttttccagctccggataagaggtcagaatagtgaacaggtctgagtagggtttgttgagcagttccaccgcatggggaaacgtacagtaaatgccgtttttgtaaatctttaaataccagattattgccgcaagcagaatgataggggactccacgaagaagtccccctgtttttcgatatcgggtaagtcaagggcattactgcccccttctcccctaagaaccgtacgtgagagtttcccctcatacggctcaagcaactcaatatttctatttgttgttagaaatcggctcatactttcaacagtttcgtttatttcgcttgtagcagttgttatggacaagttgccgtacaattgaaccaccaacagatatttcattgacgttccatgcttttgtacaatctatctccttgccgcataacggacaagtccgcttctgcttgttccataaatataagagtgacttacgtcctttgagagattccagcatttgttgctcctttcgctgaaagaaataatcatcatattccgggtcgaaagggtttgcctcccccttgacttgcttgtacggagtataatgtatatccgacaaccttttaagggtcaggtagttcactttcttgctttttgtttcatatttccatgcaaacgtccatttacgcccccgaatttcatgccaatacttatctgcaacccaagacttgcgtttctttgggtggcgacgtaaagcccatttctttgtgaggttgtaaatgtgattgtcgcaaccgtgaaaagcattggttgatgcaccatatcggtaatagtttccccaacctgttatcacaggattgagcattcgtatcagcgattcctgcttacacattttatgtcctttaacgatgtcactgatttttgccctaaagcgtttctgtgcatctttggacggagatgtgtacagccttttgccgaacttccttacattgaaacctaagaaatcaaatccatcgtatatgttcgtaatggtagttttctcttcggataaggtaagacccctttctttgagaaattctatcaccattggtttgacctcgttttccaataattccttatctcgacctgtgattataaagtcgtccgcatacctgataagattcactttgtagtggaatgtcttatagttgatgaaacgtcttttgaatctttcagccaagagtggttgaagtccgtcaagtgccatatttgcaagtgtcggtgatatgatacctccttgtggtgtaccctcttctgtcgggaacagtttaccattgaatacagctccacatttcagccattttctgagtattgttttatccatagggatattttcaataagccagccgtgactgatgtggtcgaagcaacccttaatatctccctccaaaatccattcgggggaatgctggcgatttagaaccgtatcaatctgacgaattgcgtccattgtcctgcgcttctttcggaagccgtaagaaaaacggtcgcctgtcgtttcggctatcggttccaatgccatgagatataatgcttgcatcgccctgtctttcatggtcggtattcccaacggtcggagtttaccgttctttttcttgatgtgaaccctacggagcggctgtggatggtagccacgacgtctaagttcaccgattgctttgtacttgcgcttgggagagtcccaaagctgtttatctactccagacgtattcttccctttgttggaagtaaccctctttactgccaatgccttggcgtaaaaagagtgggtaagcatccactgcaaggttttcaccttgttatgtctgccttctttctgagcctttacaatacgcgcttgtagctttcggacataggtttcacacttagaccagttcataccgtcccaagtcagattcctgctgtcagcaggcgcacacgatgttttaatctcgttcatttgctttcctccttttgaaagttctaaaagttatcttgtaaagagttaccatatacggaagtctgcccactttcgtgtcggatgatgttaccctcattaactcgtgatgttggttcaatccgtatcctccccattacagggcggcattcgctttctccgttatctcatacctgcaccccattcggcttgccttgcggttcgcttactcgcattattacgagagagatacaggcttgccctgttccacgcaattgacaaacggatagtttaggttctgccaagtccgccggcagtgctatgtccgtgtaaccccaacatgggcgagggttatccgactgcttaccttttggtgagagctaaagtatcttgcgctccttcaaaccttacgacggctaaagtcagttcacattacgttaaccatgctatccagcctcgccactcgacggtatgatactaaccgcccttgacgttccctcacggttcagtcttgtcctttcggaaagtgtactttgtcctataagcttagcacaacccatcactggagatgcaccttatagtaggctaccgctgacggaacagcgggttaaatcttgcaatatacattgctgtttaacaatcaattacgtgacttttcaggtcacacccaggtgcgattgaggttgagcattatcgtatagcttgcctcatacgcatcggaaatgtccgtcatgaattccggattaatgggattgcaccggtgagacctgcgcggatcgtcgaaattgatgacatagaaccggggcttgacctcgtacttgtccatattcttcaacaaagaattataggcgatggtggacaggtcatcaaacttgtaatcgtagatgtaaatcgcaaagcctttggctataagctgacgtatgtaactgttgactatcgcataggatttgccactgcccggtgtcccgataaccatgcaggcacggaaaatattgacaatattgacaaatccgttattccagcgttttttataatagaatctcgtctggaggtttaccgagtattcattctccatcagtcgggtttcctgcatgaaactctcattttccatattgaacacatcttccatgaggttgtgcctgtaaatgcgactcatccataaccccgacatcaacagggcgagatagcctgccgtaagagtaaaaatatagaatgcggtatttgccatgtgtggcaatggcagttcaagaagccaccagttcagaaaaaacaatgcgcatcctgccaccaacgccgcataaattttaggccaggttatcttttcacctttgaccccgtgcgtacccagacaggaaacggccagcagaagcactgccaacagtttgctccagagaatacagttgaaaattccggtcgtgttgttgaagtttaccagaatccggtctatcacctcaaggttcaggtgccatgcggtgatactcggatagcagtacacatagacgtgtaccaccaaaagaaaaatactcacggccctgccgaattccataatcttggcaagtgccctcaaatcatcttcctgctgcataagaattatatataaatgggttgatacttgttttgtctaaatgccacgcttgcgtccggtcttcttttttttcttcatgcggcgtgcaaaggcttcctcctcgtaatcccgcggattggtttccaaggagagaatgcctgccgccagttcgagcgtgctagaggattcgtgacggtgatgctgccaaagttctgtagcggaatgtccgccccgttccttttcgggtatgttttctaaccatttgaaatagtcgttgaacacattggcagaaaacaccttgcccatgcgtgagccgttgaacaccgcccgatggttgtgatcaataaaggtgacaccatagatacgtccccgctcattcttgcggaaaaccacatcaatacgcctttgcccgagcagttccacaaaccgtttctgtgaatccgcctgccgcaaggcacgaacgatgtccgcctgtatggagggggcccatttcccgtctttgagagctttcagattcatcagcatccgcttttccaactgttcatttccgaagcgtttcccaaatcgggaacttttgaacggtgggctgaccaccttgccggtatcatccgtgaccgaatatacaataccggtatatggtgtaccgttgtattctcccctgacctgtttcgcctcgatgttgagcgtggaaagcagcgcgttgtattccccgaaggtttggaaacggtagctttccaatacggctttaagggtattgcctacctgatggcggacatctcccaaggaggcgtccacctttcttagttccgcttttggattccgcttttccgcatccgctccgtttcgcagaccgaaatccgcttccagctcccgacaggcggtcatggaacgccgatgctcgtaggcatcgctgatctttttcccctgttcatccacacagacactgacgatatggatatgggtattgtgtgtatcggcatgtttgtaggtgatgtaaggctgattcccatactccatcttctgcatataacgttccgccagttctgccaaccgcccgtcggtcagccggtcttccggtgctggggaaagggaaatgtgcaggacgggcttctccgtattgcggtttgccagcaggtaattctcaaaagagagcgatgccaagcgcatgtcctcgctcggcaatccgagccggtcggaaatcatgcggttaccggaaagaatctcagccgttccggctgctaccttctcatagttataagcaagcgctccgtaaagactcatgccatggcttatttttgcaaccatttccgctcgtattcctgggttagtgccatgacctttttgcagatgagcatcagctcaagactcaatctttccaacttatagagcaatgccctcgcccgtttctccccgaaattgttctttaaggcacgtaccacctggttgtagttgttgccgacagcctggaactgtttgtggaattctgtcagcctgatgtaatagtccatcgtcgccttgtctattttcacgacctttatctgtcccgagaagatggatttcttgatgaacagcgtgaggttgccggctcctgaatccgccagcaacttttcaaatcttgtgttctcctcggcgttcaggcggaaactgtacttgtggtccgccggatcatttttaggctttctgcccgtccttgtccctgttgttttctccatacacatgagatttttggtttgtacttttttctcttccagaatccgcgactttggagcggattcccccgcccctctgggcgggcaagttggttcttgtcggacaaaagactttttgtcggacaaggacacaacttgctctgttcgcttgaacagagaatcctcctatggtcggattgctgcgcgacgcttgcggcataccgtggtccgtgaagtccttcttcctccattgcgtgattctgactttgcaaaaatagaagaacgcaacaagctgtaaaacagggataagtatgacatttgatgacatctgacgacatctgatgtcagagcgaggcaatattggcggaagtcttggaaatagccgttacttttggactgtgacagggaaacaatcttccgatgtgctgataaaatatacccgtgttaccggcaggtcatcctctgtccacggcatgtttttaaaatattatgttattgtgtcaagagaaaaaaacggaatgataaccatgaaaagagaaaatacaatgatacggccatttggcgacaagatgccgggagggtacaggcatgacagcctgtacctatatgacaatcttccatttttcaggcatgacggtaatattgtgccatgatccggtagggagacaagcccctcatatcttatgaggatgttattctgtagtgataacaaggcctgaatatgccatccgtaccgtgtcatgtcccatgaacccgacaagccgttgaaaagaagaaacagcgagaacattaaaacgattattaacccacaattcgaaagcttatgagcaaacgatgcacattcatcgccttgagcaaccagaagggcggtgtgggcaagtccaccatgacggtgctgcttgccagttatttccactatgtgaagagaaagaatgtcgcggttatagattgcgactatccccagttcagcatccaggcgctacgttcccgtgacatgaaaaacgtcgagagaagcgagtccctccaacagttgttgtgcaggcagtatgaacgaacggggaagaaagcctatccggtccttacctccgggcccggcaaggtactggaaacagcagaccggttgtcggggaacagtgatatccttttctttgatttgcccggaacggtgaatactccgggaatccttgaggccatcatcaacatggactatgtgtttacgccggtcgtgcaggaccggatggtcatgcagagcagtctgtctttcgtggcgacgctccgggatttcatccggcaatatcctgaagcaccgttaaaagagatcctattgttctggaacaagattgacggacgtgtctccagagaggtttaccgtcactataacgagatttttgagaagatcggtctgaagacgctctcgacggtcatgccggacatggaacgttataacaaagagacctcttctggcgggcagacatttttcagaagcacctactttccaccttcggaaaagttgttgaaagggagcaatatggatgtgctggccgaggagatcgaacggattatccatcttaaatctgacaagacatgaaaaaaaggggcgtattcaatgtcaatgaggaacggttgaaagagttcatggccaacggtacggatgccgagggcactcctaagactccttttgcggaagaaaagaccacaagggaaaccgatattttcccgtccgtacgggaagatgcggacaaaccgcttcctgtttcccgcgagccggccggaagcggaacctcacttccgaagaagatacaagagtaccgaaaaaattttctcaaccgtaagattgccgtccatcgaaagcagacttatatctgttatgacacctaccgtaggcttgcacggattctgccgttgctcagtgacggcatgactgttcccgcttttctggacaacgtgcttgaccatcatttggaagtgtatgaaaaagaactggatgaaatggttcgcttgagtacccaaaattcacattagattatggaacatctgtttatttatccagtcctgctgtttgtaacatatttgctgtacaaggtacttaaaatgaaagcaggcaggaaccggttgaggaaaggcggggctctccccccgatgcaaacggatatgaggaagtcagtccgtgatacgacttatatggaaaccgtatttccggcagaattcaaagaacaccctgacgatgcggatttctttcctgatttcgcaaagatggatattccggaaaatttaggggaaaccctgattgaagccttgtccaatagcgggattccggaaacggacgctatcgggacttcggtagagggaacgaccggtctgcaaaccggtctggttttgaaacaattcaagcaagaagaagatatggaaaacaaagatttattgaaaggcatggaaaatgcgagtgcttacagagaaatgttcctgacccggaaaatgaccggagccaggagacaaacctatattgatgaatccttgtatgagacattgaccgggatccttcctgtcattgcgccgggaatatctgtacccacgttcgtgaacaatgtgttggcggagcatatggagaaataccgggatatcattgatgagacgtgtcatcgaaaatttaaagaaatgatggtatggaaagactcgtctatctgtcggtgagggtcggctgtgccgcttacctgttatataaggtatgggaacaaaagaaaaaagtacgtgagctgtgtgacctgctgtacacgccggcgaaaagagaacaaatgatatcgatgtcaccggagccggcggatgagaaagaagtgatgggaaagacacgctttgtctatcttgacgagaacgccgggaagacggcggccccctatatgagtcagccgttggaacaggggacggactatatcggtgaggatgaggaaatccgggaagaggatgtggaatgtctgcttccgctggaggagatggaactccttcggaaggagcaggaagaactggacagcgcattaccggaaacggaagtgattacgcaggcggttacgctggaggagttcagccttgtcggggatgtgctgatgagggtgaacggggcggatcaggatgcggacaaaagaagcagtgccgcacggacgctgttcgctatccgcaataccagtctgttcgatcttttcatttcccaggtagggaatgaggaagccgtgaataaactgctggaagagaacctggatgaagatgggaacccgcgacctttgaaaaaaggggggaaaaggaacaatggcggggttgactggcgggagttggtgtaagagggaatacttccgggaaataggattccgcctgcggacataggcggaattctgtattttacagaaaggcggctttcatttatatgccgttcggcatgtggcttcatttcggaagtaattttggtttaaaaaagaggagctattgttttattttgagcatttgttcattatatttgcaagcagaaacaatatatataatgtcaccacgtcctaaaaatatccgtaaagttaatgacatgcccgttgccgcaggattcaagcccatagggctgaacggttgttgtaagaataccatattcttgcattttgaagagtatgaggcgatacggttatgcgattatgaaatgaaaacccaacaggaagcgtctgtttcaatgggagtatcacgtccgacactaagtcggatatatgtcagcgcaaggcaaaagattgccaaggcattggttcgtggtgttaccattatgatagaaggcggagcagcgtacacagacagtgaatggttccgttgcggagcatgcggtttcttattcaacaatatcaatcccacgcttaaaatccgcaagatggaatgtccggtatgccactccgatgacttaagcgcaagtaatattaacattaataaaaatgagattatgatgaaaattgctattccgaccagagacaatgtagtcgataaccatttcggtcattgtgagtattacacaatcctgacagtaggacaagacaaccagattctaagtagcgagactattccttctccgcaaggatgcggatgtaaatccaatatcgcaggagaattggaaaacatgggagtcagcgttatgctggcaggaaatatggggcaaggtgccttgaatgtacttacgtcccaccatatcaaagtcataagaggctgttcgggtaatctattggaagttgccgctgattatttaagcgggaaacttacagattcgggagtgggctgttcatcccatgaacatcatcatgaatgtcatggacatagccataaagaatgatgtccggaaagaataagatgccgcttaatattatcatagactttgtcatgctgatggcaatggctttggtaagtataagtggcttcatattggaaatagtaattccttcccgccatgctgtaagattccaagacgctaccccatggtgttcacatttgctgggcttgggaaggcatgattggggtaatattcatttgtgggcgggagttgtattggtcactctgcttgccattcatatcttgttacacataaagatggtatcggcttttgttacaaagaaatgcccgaaccatacactacggatattgctttatgttttgttattgatgctgttaatgatgacaataatgccttggctttatttatgttattaatttagaacaagccaacttattactttatgtggtagaataggttggcttgtttatttatgaatatccgatatggtagaacattggaatttagattcaagatcctcctcgaatttcataccaagttattgaaggcaatggcagtatacgacattattccttatattcaggcagttacgatccctttcaatccgcaatctcaaaccgcacaagcatagagtatttctttttaattgtacggaaactatcaaatgaaacgacactggaggacagcacgttactctgtgagaaaggaaggctgctacctgcttcgtcttctacaatacgtattaccggtcccaattttttacccaatgcctccaccagataggacgctttcctctgcgccgctttcaaggctgcgatttttcctttttgatggtaggacaacatgtccttgttttccagttcaccgatgcgcatggtatggatacctttggtatccatacgtttgaggatttcatcaatctgtttgaaatccagtaacgtaatatcgaaggtcttggccaccagaaagtcctgcccttgcttacgccaataatcaccgatctcctgcgtacggacggcattcggagagatacccgcgtcatgcagcacttcccgcagtccctgttcgatccggtccaaagagatctttgtacgatattcctccggtttggacctgccatcaaactcctcctcgaagtattcacggatttcgataatgtagtgaatcctgtccggcacgatctcaatctcggatgtcccggtcacttcaatgtagcgtccgtctgcctgcgcctgcacctgtgacaggccggctagcggcaggagcattgccaataataatagtcttgttatcataagcggttgtatttattttacttcaaattccgtatccatataaatttcgagttgcagtcctattcggtattttcctgaaagtaacctgcctgcttggaatcgtttcttgtcgtttctgtctgttatccggttgacatcccatgagacaggaatggtaaacagtatcgcttctccacctttcaaacgggcacggcttttcatataattcgcttctcctacccaaccggaacgggcaaagggatgtaccatatatcgctcgtctgtacttatactagggaaaaagaccggttgtacctccaggtttgtatggttttcaaataaaatacgtatggaatcattattggatggtaataccttgaaagcaaaggcaccgtccatttccgtctcctttatggaaacaatacttttacctgtcagattgcaataggtatggatgttggcaaacacataaaaattagcctggtacctgttgggctttaacggatatttaaactcggacatacggatatgttcgggtagcgtatcgcctttggataaatctcttcctccaatggcgaatacaagattgtctataaaggggaaaccgagccatttgccatttaccatctgtttgagattatgatattcaagctcggctgtagggccatccatattgattatatcaagcacaatctcttttatccgaggagaatatactggttgtcgtgtcctgattttgtaggcgtccgcatgggtgatggtgacagcgggaagcctttgtatgcggatgcggctctcatacttttctatttccgacagtgacagcggaaaatcgatatcctgcgcttgcaatttgggtaacaagcagaataaataaactgataacaagtacgctatttttttcatacgttttgactttaaggttgtacaaacttacatcttctgtttatatatctccattcttcactatcccaataatgtttttcgccgtcagacccggatacgactttttgttttcccgtaaatgtaaccttagcctttcctccctcaaaaaggtatgcaaacttgaattggggagtaatgattatgtgtcccgacgaatcggcaaaacccatcaggcctttctcatccatgattcggaacaacccttccttgacataatcaggtccgttatcacattcgactacataaaaaagtttcttgcctgcatcgttaatgcagactatcctggcatctcttggcttgtcttcgtatacaaagcctatacctttgatggtatcggtttgacagaatttatatctgccgtatggcacaatggtatctccacgctcatttagataacagaccggaacacccgcttccaaacgaggttcaggggtatgggcaatcaaggtggcatcatatctcatcaagacgggttggtcgcaggtggaataaccggtaataaccacatccgccttcggaaggagtggcatggtatccagtctgtattgaatgcatagcgtatcctttccagggcataagacagtaggttcatttctaaacgattgtaaaacatccagtactgattttcgaaatgaacggggcgttttaccaagaatagtggccgtggtgatgtaaccatcctgattcacttcgtaagcaactcgcaagacacagcctttgttcttcttctgccagactatcgggtatttacatcgtcggctcaatgtcttgataagccagctttcatcccgtagctcatccaatgatttatccagtccgaagatgccgggaggtacttcctcgcgccatgttttcccgtattttttatccagatagcggaacacttcccggttgtaggctgtcaacagacgattgggcgtgtttaaatagcaatccatctttccgttttctttcaggggataatagctataatatttgactccatactttttccaaaagatatgttcccgtacttttttgtcttgttcaatgggtatgaccagttttagattcgggtgccctttattgatatattcacgtgacaatttcggtgaacatacatattcttcgatatagtcataaggcaatgtcaataccagttgtaaggtgtccgtgcatgttgttccggacacggtgacgagtgtgtcacaaggattcaagccaataaattctgcccgcaaaagacattgtcctttttttaaatgttttattctgaaagttcctgtagaatcagtcagccaaccttgaaaaggcaatccctctactctcagattggaaccggtcaacggcctttttataacatcatagggcggaatctgtcgcacttcttccccataaactttacctataatggaatatccggttgtatcgttatctgctttggatggtaaatcatttttcttccaaatacctaatacgcagtttagaggttccatggtatatttcccgttgatgaatagtctctcccatggataaatacttttcagtgtctctttgaaagctttcactaatgggtgattccggtcttcaatgttttctcctttgggacgtatgaacaaagttcggacatcaaagtccaggagatggccatccggggtacattggatattacgtatactgaatatcagccgctgtcctttgtacttcggaaaacgatgccaggggaaccgccggatgatttcatcttgtgattctaaaatctttattccaggttgtttgaaattatggtatgtccgtacactttgtatcctgccttgcctgagtagaattacctgttcggcttccatattacggtcgaaaccggagtggacataatgtaccaaatcacctttgccggcccgtagttcaccgctgaaccagcgggcaggaatccttccgttctcataataagaggcaaaaagtgttttcagagcgtctgtgtggtaaatcaaagtggaatctttccgacttgccttgtcatatacgcatatttccatacgttgcaggtaaagacagctgtcctctattttccaaaaggccgtataaccatcccagttggcggttgacatacaatgattttccggaagaaagtcccttaaccgtgtatatagggcggaatccttgtctattggtctggccatcagccaccattgctcaccattgatgtaaatgacatcacaagactgtcccgtcgcctttatatacaaagagacgaatagaaacaagattacgatagaatatctctttatacgcatggatctgttttacttaattgtcacactatccttttcagaaatacaaaaaagaacactctttttgtattcttcttagacaaaaatgtggttgtaagcactcatttctaaaactccaatacgcttcttgctcaattctatatatcagccctttactgaagcaattttcagtaaagggctgatattgttttattatagaataaattaaaaacgataagcgaatcccaaattgaatacagcctgatcaaaatcactgaccagttggtagcgtaactcgaaattcataatccaactacttgtcaatgcgaagtcggctccaccaccgatattcactcctaccctgcactcgttatgattgtcatcatctttgtctatatgaatatggtctccgtccacatcaatatcaaaaccatctcctaggtcaaacatccaattagaaaatgtaaaaccgaataggggatataactttacgcttctgcctacgggacataaataatggagattcatatttatgtccaacatactaacattgtcgttttctataaagtaattcaaagacggctcaagacgtatggggttggttatattgtattgatatttcaacccaaggccaatactctcaatttccgtcccataactcagtccgaatccaatagcttgtctacctttttgagcataaacgccactcaacataacaaacaacaatcctaaaaaaattaaaatctttctcatttcaatatacttttatacctataagtgttaatcgtcatcccaatcatcatcgtcatcgtcatcccacctataatgtttgttgtgtttatgcttcttgtgttttttataatgtttgtgatgatgttttcggtgatggtcacagtatgaacaataatgttcatgccaacaattactatgataatttaccctgtcatagaaaggattgtaatataccgatcccggccttatacctatctctatcaaaacacgatcccagccgtgcctatggtaacgtttataataatcacatacatcacgcatgtgcctgccagatgttttggctatttcaagggccaaacctacattcccccaatctcttccacattgcctataataatcatccaatagattgttgggggtattatattctatacacaaacgttttcggtaatccgaaagttccacagaggcatatttatttgccctgccaataaacaatgatagcctatcttgcgcaaacatggaacaagaaatagctatgagcaatagcaaaactttaaattgtctcatatttttacaaagctttttgttgataaatacggttatattcgcaaacataggtataaaaaagacaaaaagcaatttttgtctaaaaattatagcaaaactagattattatggtcatttaggacatttgatgacatctggtgacatctgatgacagcactgaattacagtacgttattccattttacattcgctgtcgaattcaaatttatgtctcacctaaatgattcgacaatgaagagaaaaatccttttttctgtgatgtgtgcggttattaccgccagtgtttttgcgcagggccaaggtcagggccttgccggtatcaacgcggcgaccagtctcatgacctcgtatttcgatcccgccactaagttgtgctacgccatcggggccgtcctggggttggtgggcggtatcaagacctacggcaagttctccagtggcgatcctgatacctcgaagacagccgccagctggtttttcgcgtgtatctttctgatcgtggccgccaccatcctgcgttccttcttcctctagaggcatgaagtatccggtaaacaaaggtgcgggcaatcccgtcgagttcaagggactcaagtctcaatatctgttcgttttcgccggcggacttgtgatggtgctccttgcggtggttatcctctatctggtgggtgtggaccaatggatatgcatctccttcgggagcatatccggtggcctactggtatggatgacttttcggttaaacgcccgctacggtgaacacggactgatgaagctgctggccgaaaaacgccatccgcgctacctaattcaccgcaagagagtcttcagattattcacgaaaagaaaaaaacaaaaatcatgagaaatgttttaaaggcggaaacgctagaacgcagattcccccttctctcagtagagaacggctgcatcgtgagcaaggacgccgacctgaccgtggctttcgaggtggagctacccgagttgtacacggtgacggaggacgagtatgagactatgcactcttcctggataaaggccatgaaggtgctgccggagcatagcatcgtctgtaagcaggactggttcatccaagaaacataccgttctaaaagtgatggtgaggaacaaagctttcttacacgcagctatgaactacatttcaatgaaagaccgtacctaaaccacagatgctacctgttcctgacaaagacgacccgagagcgtagccgccaacggagcgatttcagcaccctctgccggggattcctgctgcccagggagataaccgacaaagacacggctgcccgttttctggagtcggtggaacagttcgaacgcatcatgaacgattccgggcatataaggctgcggcgtctggaaacggacgagattactggcacgaaggaacgtcccggactggtggagaaatacctctcgctctcgctggaggatgagagtgccgtattgcaagacatctgcctcaggcccggacggatgcgtatcggagacaagcggctttgcctgcataccctctcggatacggaggacctgcccggcaagctctccaccgacatgcgttacgagaggatgtccacggaccgcagcgactgccgcctctccttcgcggcgccggtgggactgctgctgccgtgcaaccacatctattcacagtacgtgttcattgacaacgcacaggaaatcctgcagatgatggagaagaactcacgtaacatgctctcgctgtcaagatacagccggagcaacgccgtaaaccaggaatggacggaaatgtatctggacgaggcacataccaaagggctacttcccgtcagatgccattgcaacgtcatcgcctgggccgaggacgcggatgagttccgtcgcgtcaggaacaacacgggcagccagctggccatgatggaatgcacgccaaggtataacactatcgacatgccggtcctctattgggcgggtattcccggcaacgcaggtgattttccagccgaggagtcgttttacaccttcctggaacaggcggtatgcctcttttccggagagaccaattacagaaactcacccagtcctttcggtatccgtatggcggaccgtcagaacgggattccggtacatgtggacatttccgaccttcccatgaaacggggaatcatcaccaacaggaacaagttcatcctcggtccttcaggcagcgggaagtccttcttcaccaaccatctggtccggcaatattacgagcagggcacacatatcctgctggtagatacgggcaacagctatcagggattgtgccgcatgattcacgaccgcacccgtggggaggacgggatctacattacgtacgaggaggacaacccgatagccttcaatccgttctatacggattgcggactgtttgacgtggagaaacgggaaagcatcaagacattgatcctgaccttgtggaaacgggaggacgaggcaccgaaacgttcggaggaggtggccctttccggggcggtgaacgcctatatccggatgatttcggagaaccagggtatcaaaccggatttcaacggtttctacgagtttgtcgccgatgactacaggagaatgattgaggaaaaaaaggtgcgtgagaaggattttgacattgacggtttcctgaacgtgctggcacctttttacaagggcggagactatgacttcctgctgaattccgacaaggagctggacctgacaggcaaacggttcatcgtgttcgagctggacaacatcagtggcaacaaggtactgcttcccgtggtgacgctgatcatcatggagaccttcatcgccaagatgcgcaggctcaaggggatccgcaagatgattttaatagaggaatgttggaaggccctgatgtccgccaatatgagtgagtacatcaaataccttttcaagacggtcagaaagtatttcggcgaggccgtagtggtaacccaggaggtggatgacatcatcagttcccctatcgtgaaggaggccatcatcaacaattccgactgtaaaatcctgcttgaccaacgaaaatacatgaacaagttcgagcacatccagcggcttctcggcctgacagagaaagaaaaagggcagatactctccatcaaccaggcgaaccatcccgggcggttctaccgggaagtgtggatcgggcttggcggaacccactcggcagtatatgccacggaagtgagcggggaggaatattacacgttcacgaccgaggagtccgaaaagatggaagtacagcggctggcagaaagattggatggcaacctggaacttgccgtccgccatctggcagagaaaatgcgagaggaacaaggacaaagatcaaccctaaaatgaaaacgattatgagaaacaaaccccttatgagactggcggtatgcctgatcggcatggccgccctggtattgcaaagttgtgcggacggtggtaccgaccgtgacagactctgcggatcgtggaccagtgtggacggcaaaccggacgtgttggtatataaggaaggagaggcctacaaggtgacggtattcgcccgtagtggcaagacacgccgcctcaggccgcagacctacctgttggtggaagagaacggcaacctctttatcaatacggggtaccgtatcgatgtatcctacaacgaggagacggatatcctgactttctcacccaacggggattatgtacggaaggaggaacgcccatgagagcgaggacattcctgatcgggataatgcttgtgctgggcgggaacatggcccgggcgcaatgggtggtgaccgatcccggaaatctggcccaaagtatcatcaacatgtcggacaacatcgcccatacctccaagacggcggtcaatacggccgacaattttgcggagacggtaaagatctacgagcaggccaagaagtactacgaccagttaaaggcggtgaacaacctgatacaggacgcccgcaaggtgcgtgacatcatcctgatggtaggcgatgtgtccgacatctatgtgacgaacttcaaaaagatgatgaacgacgacaacttctcgtcccgcgagctggacgccatcgccttcggttacacccgcctgctggaggagagcaacggcgtgttgcaggacctcaaacaggtcatcaacgtgagcacgctctccatgaccgacaaggaccgtatggatgtggtggacaactgttattacgaaatgcgccgttaccgcaatctggtgagctattatactaacaagaacatagccgtgagctatctccgtgccaggaaaaagaacgatatggaacgtgtgatgcggctctatggaaatgaaacctccaaatactggtagcccatggtacctttgacgatagattttgccaacctgcataccatactgggaaccctgtatgaagatatgctccccctctgcaaggacatgatggacgtgggcaaggggcttgccgggctgggcgccctcttttatgttgccgtacgcatatggcagtcgatggcacgtgccgagccgatagacgtgtatcccctgctgcgccccttcgctatcggcatctgtatcctgctttttcccacactggtacttggcacgctgaacaccgtgctcagtcctattgtgcagggtacgcacaagatgcttgaggggcagacgctggacatggagcgatacagggcgcagaaggaggagcaggaaaaggaggccatgctgcggaatcctgaaaccgcctatctggtgagtgacgaggagttcgaccgacagctagacgagttaggctggtcaaccgtggataccgcctcccggctgggtatgtacgtggaggtgggcatgtataacctggagaagaagatccgtgacacgttccgcagcctgctggaactgatattcgccgcggcgtcgctgctgatagataccgtgaggaccttttttctggtcgtgctctccattctgggaccggtagcgttcgccttcagcgtatgggacggtttccagtccacactcggacagtggttcacgaggtatatctccgtctatctgtggcttccggtcagcgatctgttcagcaccctgctcgccaaactccaggtgctgatgctccagaacgacatccaggaattgcagaacaatcctgactactcgatagacaactcgaacagtgtctatatcatctttatgcttatcgggattatcgggtattttaccgttccgacggtggcgggctggatcgtgcaggcgggaggagccgggaatttcagccgcaacctgaaccgtaccgccacgaaaaccggcagctttgcggcaggagtgggcggtgccgtattgggaaatatcggaggacggttgagagacaaataagccttgccggaaatatttgtttattcattcaaaccaatcattcgagaaatggaattcaagtctttgaccaacattgagagcagcttccgccgcatccgtatgatggcggccgtttttatctgctgctgcactcttgtcaccggctacgcgctttggagctcgtaccgcttcgccgaaaggcagcgtgagaaaatctatgtactggacgggggtaagtcgctgatgatggccctttcgcaggatctttcgcaaaaccgtcctgccgaggcgagggaacacgtaagacgctttcacgagctgttcttctcgctctctccacagaaagaggccatcagccacaacatcgaccgtgccctgcaactggcggacaagagcgcctaccactattatgtggattttgccgagaagggatattacaaccgcctgatatcgggcaacatcaatcaggtggtgcatgtggacagcgtggtgtgtgattttgcccgttacccttacaaggcgaggacgtatgcccgtcagatgataattcgtgagagcaacgtgaccgagcgcagtttggtcaccacctgctcacttcagaatacgggacgttcggacgacaatccgaatgggttcatcatcgaacagtttaccattctagagaacagggatatcagaagcacggaacgatgagaaaagaaaaaaaacacctgagacgtatggactgctgtatccggctgttctgccaccgcctgacaaggaaacaacggaagatcgtgacaaccacggcattcctcttgtttctgacggcctgcctccatgccatcctcgcctcgctatccggcttgggagagcttgggggaaagatgaaaatagaatatgtccggccgcttgacttgcgaccggaaaaaagtacaatcaatttaaacaccccatccgatgaaaatagatatccagaagattaaaaaacagctgggattcccaagcgaccggccgttgactctccaagagaagcgccggtatatgaagttcgccgtctatccgctcttcttcctgatattcgcggggattgtcctgttgatatacagtccgaccgaaaaggaaaaagcggaggcggagaaagagaggggattcaataccgagatcccgtctcccgaagagagccgtatggaaggcaacaaggtcagcgcctacgagcgggaagccttgtcgaagaaagagagaggacggaaagacactttcctggaaatgtcggaactgttcaaccggaacaaggaccggaaagacaccgtaccgtcagtggacagcggagtgaaccttgaactgccgtccgtaccggaaaccgtacagacgcataatccggtacgttcctccacctctgcctaccatgacatgaaccgctcgcttacgaccatttacacgccacgggaaacctcccgggaggaggaactgctccggcgtatcgaggaactggaaaaaagacagaacatggaaccgtcccaggaacagtcattggaggaaaaaatggccctgatggaaaagtcatacgaactggcggcccggtacaacggcaaacagacaccgtccgttatccctacggatgaccggaaagacaggacatcggtcaagccggtcaagcggatacgacaagaagtggtatcttccctggcgcaaccggtgaatgacggggacttcatagccggagtgtccgaagaaaggaacaccggtttccatacgccggtgggcaggacaccggtatcggaccgtaataccattgccgcctgtgtgcacggcacgcagaccgtatcggacggacaagccctgcgtgtccgcctgctggaagcgatggcagtggacgaccgcctcatacccaaaggaacggtattgacaggcggaacacggatccagggagaacgcatggatattgtcatcaccaatgtggaatatcaaggaaccgtcattccggtggaactggaagtgtatgatgcggacggtcagcaaggaatattgatacccaactcactggagtatgatgccgtgcgtgaaatagcggcgggcatgggcggttcgatgggaagcagcatcagcatctccaccgacgcgggagcgcagatagcctcggatctgggtaaaggcgtcatacagggcgtgtcacagtacatcaccaagaagatgcgcacggtcaaggtcacgctgaaagccggacacaggctgctgcttcactctccgaaacaatgaaacggtatacagacgagaaaacagaaaccaattattcaacaaacaaccaacaataatcggacatgagaaagattctgatgatgtttgccctactgacgggcttcatggctgcgtatgcgcagcagagtggcggagattatttcgaggggctgagccgcaagataggcttcagccggatgatacctccgcatggtctggaaatcacttacgacaagaccgtacacgtgattttcccctctcccatcaagtatgtggatctcggttccaccaacctgattgccggcaaggcggacggcgcggaaaatgtgatccgtgtgaaagcggccagaaagcattttcgtaatgagacgaatatgagcgtgatcacggaagacggaaatttttacaccttcaatgtcaagtatgccgatgaaccgttgctgcttaatgtggagatgtgtgattttattcatgacggggagacggtgaaccgcccgaacaacgcgatggaaatttatttgcaggagctgggcagtgagtcaccgcgtctggtacgtctgatcatgaaatccgtacacaagcaggacaagcactggatcaaacacatcggctgcaagcgcttcggggtacggttcctgctcaaaggactttatacgcatggagacctgctctatttccataccgaggtgagaaatgccacccatgtgccgtttgacgtggatttcgtgactttcaagatagtggacaagaagatagtgaggcgtaccgccatgcaggaacaggtgatttatccgctgcgtgcgttcaactatgtcattcgtgtggagggaaagaaggacgagcgtaccgtgtttgccctgcccaagttcaccattcccgacgataagaaactggtagtggaaatgtatgagaaacaaggcggccgtcatcagatctttgaggtggacaacgaggatctggtgcgtgcggaaactatcaatgagctgcaagtgcgatgaagaggtatttatatatcacctttgcgctgctggtacttctggcagggcaggcgggagcacaacgccgtcttccaaaaatgaagggcgtcagtctcacggcaggaatgacggacggcttttactgcaaggcgaataagccggatgccggtttctctttcgggctggcggtttccacttatgcaaaaaagagaaaccagtgggtgctgggcggcgaggtactgaagcgcaatacgccttatcgtgacggttctatccctttagtgcaatataccggtgaaggcggatattattataatatcttttcctcccctaataaaacggtattcttaagcattggcggttcggcgatgctgggctatgaatcggtgaacggggggaaaagactgctgtatgacggtgccacgctgggacaatgcgaatcctttatctatggtggtgcgataacgttggaggcagagacctacctatctgaccgtttagtgctgctgctccggcttcgtgaacgcatcctttggggcagcgcttccacgcatgcccacttccagtatggaatcggtatcaaatacattctctaatttttaaacccatatacccatgaaaaggaaaatcgttgactttatgacgtttatatgctgcctggcagtttcctgtctttctcttgcttcttgtgacagcgaactggacgttcagcaggaatacccgtttacggtggagtcgatgccggtagtcggtaagatcgctgatggtgagacggtggaaatccgtctggaaattaaagcggagggaaatttctccggaacagtctatacattgagatatttccaaccggacggtaaaggcagcttaaagatggaggacggtacggtgttgaaacccaatgaccgctacctgttaaatgaactgaggttccggttgtactatacctcgcagagtgcggatgcgtcacagaccatcgacctttattttgaggataactgggggaatttgcagaggttgagttatgacttcaacgcggatgacacccctctggctgaaaaggatgatacgcatggaaaggaggtacaaccatgacatacctgtatttgtacataccgggaatggcccatgaggtacagctgtcggaatcggccgaccggattcccaatatgggggaccggctcgaaattgacgcggtacggctcgacaagtcctcccgcaacctgttggaaacgacaccggcctgtcactgctttgaaaagaatgcggaaacggaacggcagtccctcgcggaatacctggcggaaagtgtggtgaccgtaacgggaagaaggtggagctacggggatggacatacgtattgcacgttggatgtggaggtaaggaattgaacggaatgaggaaacttttgtttattctgatggtactgccgttcactttgaatgttcgtgccgaagatccgccctccatgctggaaaaggcggtttccaacatcaaacggtgggaaggctggcatcgggggaaaatgccttacatcggttttggacaccgcctgctcccccatgagaagctgaccgagaacctgagcgaggcgcaggcggattcacttttgagatgcgaccttgaacggtgcctgaaggtattccgtaaatatggaaaagactcgcttcttttaagtctgttaggttttaatgtgggctgttaccgtctgattggaaacgggaagatacccaaaagcagactgattcaaaaactggaaagtggcgaccgggatatttacagggaatatatatcgttccgctgttatctggggaaagtcattccaagcatagagaggagaagaaaagaggagtttgaactgttctatataccttagattgaaattatgcaaagccgtgaacggatgctggccatcgtcgttcacggctttagtcttagccactcttaatttatctttacccggttcatcagctgtcccgaaatttcatgcagttcccggcagcgttccggctgctgttcccttgcaaaggcggtgattccctgtgtcagtttccatagcgtggccccgcctgtaactccgtcgtcaggattgttgttcattagcagtttctcgacctcacgtccctcgtttttcaacaaggcacctttctgcaccagattcttcagttccttgtcgaaatccacgtctatttccgatgctccttgaatttcgatggccttctgcatgatggtgtctttgctgtacagtcctttggtcaggtcggaaacagccgatacggtggtctgcgtgtccagttcgtaggtcttttgggaaagggacagggattccggcagtcggcctccaaggtgtatttgccgcatgacggactccctgaccatcccgttcaggcacgccccgttgagcaggaacgaccgcatatcgaccgatccgttgccatagtcggatgtggagaagcgtgctcctgcgaagatgatgaccgttccgttcttacgggtgggtatctctatcggagtgggcaggattgtctcacaccatactttcgtgtcgttcatataggcatcggacacgaccgctccctgtcctcccgcctcacggatgaaagcggtcaggatatccactgagttcagccgacggtaggagtccgacaatacgccccggacttccattcctaccgcccgtatcagtacccgtgtacgctcggtccatcccgaatgctcgttcaggatggtggcgcacaactgtttctgccaaacatccccggcggaaagctcgcgcaggtatttggcgggaatgcccatcttctccgaaatctggcttatggcgttgccgtgcaggttgaagttcccttcgggcattgccatctgtacccttccttccgctttgaaagagataacggggcgttccttgctacgttggcttaccccgatgggagcgatgaaatcctgcgcgatccgtccctcactgagcagacggttgatggtgtccatgacatccccctgcctgccttctatcattcgccgtaccttgttgatgactacctggttgagtccctgctgtttctgtaccggtgcagtggccggcatgactgttgcttccatatttcttgtttttaaagtcgttgataaattacaatttgttcttatggcttgtcctgcttgttttagtaaattcagatctgtactcttctgacagacggatataatccttttcgctatatccagccgttccgaacagttcataatatccggggaagggttttctttccgtttccggtatatgcgtgctggtttccttatggcaacagatgatgtgccggacaaaccggtagcacttgcaaagatccgccaggatggtgtactcgttgtccgtatgaggttcataatatccgcaggagagattgacgcaggatacttccagcccgttccttttcaatgccgccacatccgtagccagcccctgtgcaggcttgtaaccgtacctccggggatctactgccgaaatgaactcattggagcagagcctcattccgttgatttgtgtcaccatgtccccgttccctttccggtcgcactggatgacgaaacggcagtcggaaaagaaggacatgtcggcatggccgctgcctatgcatcctatctcctcctgtacgaagaaggcgcatttcaccgccttgaaatcctccaggcatttcaggcagatccagatgccgttcttgtcatccgcgccgattccggccatccgtttacgcttgcggtcatagccgacaatcatcgagtccgccacaagatgggctgcataggtgcctgtcttgcgccggtgtacctcgtccatgtgcgccacgacacaggggtagcttttccggttgcctttgaccgcgtagatgtttccgtgccggtcttgccggaaaggaatacccatccgcctgagttccccgatgatgaacccggccatcttcccctccttgccggagggggaggagatgttgtaaagagccattaatttttccatgatactgacttttcaggagatgaacaacttttcgatttgcaggtaccgtctgaactccggtacgggacgtcccttcttgaagaggaaggacggatatttctttcccttgtattccgcggacgtgcctttcagtacttttccgaatacggtggatatatagaacatgtcctgacaattcttgcagaatgccgtatccggaaaggaatgtatctttccgcatttgggacatacatattttctcctgtttgcgcgcccttccgtgctccggcaggtggctatgctcgtgtcgccctccgtatttctcagttccaggttaccgtccgtcagatggaggctgtagaacgtgtcgaggtaaggcacccctttcttgtgccacctgcaggcgggcactttcaccgtcaatgaaacctgtatattgtctccggccgcccattcctgcccctcaatgggattcagtacggtgaaatccgttgtatgtgtataatcgttgtatctgcgtcgcaacaggatgcccgcctcctgcgcctgcttgcggatcagttcggcgacgaatgcgtgtgaggaatagatgcggtccagcagggaggcggcaatcggtgtgtttattgatttccacaatgttacctcgttccatacgacagcccgtccgagtatgttgttgctctcgtcccttgccacaaggattttagcgccggcgaagttggtatagaagtcagcggcgttgcgtgccttgtcctcataccgcatacaggaactgtgcaggctggatgtgtcactgtcggagatggggctgtagttgctttccagataggcttccatgaagtcgttcatgctttcatgcagcctgaccgtgactttgctgtccaatgagagagaactacagaaataattgatttcgtcgggtgagtacttgggcaggttcttgaacagttccacaaacgtggagggttccaggtctgtccggttctccgggaaccagggtgcctgcgggttgttccggtccgggaaactgggatgggccagatccttgctgcaggccgtgaacacgattcggattttcttgaacgtgcccacttccgtccgcttgcgcttggtggagaagcagttgtaggtaccgcgtatgatctcttccaccggtacgttcttttttacttccgaaaggatgtctttggctatcacacttccgttttccgccgcatgcaccaggcgggatttcaattcattgctaacattcagtttcataatcattcgttttattgtttataaattctgccatgtttttatggcaattgtttcttgtccggctgcatttggcgcaatttctctttccgctttctgagcaggtcaacggacatgttcctgcttgtccgatattcctcctcgctcatccggcgaatggaaggaatgcccgtctgggtcagtgtatggtttaccatccagccgtccatgaagttttcggggcagaggctgtcatggtggatgacttcccccacgcagccgtgaatgagcatattgcatatggtcatcaggcaacaggtacggttgacatcttccgcgacaagataattacccaggtggcgtacatgatatgccagcaggagacgcccacttccgcaggtagggtcgtttatcctctgcccggtcttttttccgtccgtttccgtacacattaccatcaggtcgcagatatgtacgggagtgaagaactgcccttgcgcctgttgtccctttctggaactgagcgccatgaaaaggtctcctaacgcgtcataccaggatgcggcctccagctgcttctgcatgagccgcacccattccgcaaacattttcatgaatgcggcattctgctgccgcttgtacctccagtctttcagcggaggagcacccggtgagaatccgtgtatgacgtaacgcaggaaatctgtgaacacgttcatcggatcgtacccgttcaagcctgcaaactcacagattgtcttttcaagtggccggacttctggggatgtctcatagcgtgtcatattgttctgtttttttatagaaggttactgtatgtccgttatggtctgtccgtatcttgacgggggagacgccaaggaaaaagaggtgcgtttccgctttcagcatgttccattcccatgtgggaagttccttccattccatacggtatgcccagagtatgaacagaccgggacggaatccgttgaaaagttctccgtgcagaatcccgaccagccgctccagttcttcccgcgagtaaagggtgaatgactcattccgatagataaaggcatcagccggttcaatatccggctgacactcgatgatgtatctcgtccattcttttgtggtgtactttccgtacagaggatcgggttccgtgtatttccatgccctgacgaatgtgtggaagaggacggtaccgttcctgtgccttccggtatgcccccacatccggaactgtttgctgcgtatgccatcgggaagcagcaattccggaccggttataacccaagggcctccttccgtattgtaaccggtacacttttcattttcatggcagaaaggtgtctgtgggagaaggcaaatatggacttcccggtcatcgcccctttcaatgtgtgcctgcggataatagtcaccgccacgggtagtataagtgacgacatcccctgcggtcggtaaactgactctttccctgtcctcccgcatccttgaaatcagccggttcaccttctccacgtcgcactcctttatggaacaggcacacccttcatgcctgttgagcagagtcaggctttccaaatcataaaaattaccgtacttcatattgagagcgtttttgttggtacaatttgacctggcgggcaaccatatcacagaacttctgtccgttctccttctcgcttctgaaataggcaatcatgtcccagagattctgattgaagtagccggtccatttttcgtagcagtgacttccatagacctttccgaacgtttcctcgaaaagtgcgggagtcagcccttcatccccatggtggttgtattgccacagagagacaagcagcagccggttataatccagtgtttccatatccgttcttttttaagtaaaacatcggcctacatgggtaggcatttttatttcttggtgtctttccagtctgttttccggggattgcggcaaggcttggcgaaagaaaataccgcagcgaagcgaggatgattttctttcagccaacccagcccctgaaaggggccgccttgcacaatcagcccggaaaacggctatctttacagcaagaaatgaaaaagcagacctcggattctctgttctgaagtctgcttttcgtccattgtcaagtttcatgtttttcaggtatgtatctgccatccgtggaacggctgcaatgttacggcaaacgatctgtcaggtattccatgatagagcagacctcctacgatacctattcttccatcagcataatgctgggtaaagccgaacgagtatggggcatggtcatagtagagtgaaatctcactgggatagtcaggattcccctcccaactcttcaaccgttccaagcacttttgaagtgaggtgtcaccgatggattcggcatagcgctttacattctcgaaatgttcttcattcaggattttcatgattcattgtatttttatctgttaaacacgtccggctccgggagccggtatttttatttctcgcctgcctgacagtcccgtggccgtacccgcaaggtttggcgaaagaaaataccgcagcgaagcgaggatgattttctttcagccaaccccgaaggggcctgaccttgtacgggtacacaggacgcgggactatctttgcagggtgggaaataaaatatacggttgttttttgttgtgggattttgtgtggattccttagataatcttcctgatttgttcgccattgccggacaaatgctgtatttttgcaatttctaatttcaggattatggaaaactatctaaagaaagcggcggatgctttccttgtggagcgtccgtatggtatgcgtgtggattacaggaagaaagggttcgtgctgtttaaccgcaacctgaacgtattgggcaatgtggagcatgcccgtctggaagagctgcctctggagcggttcaatgtggaggaaattccgttggagggtgaaattgtggaagaacatgcaggatttaccgatgtattcttctacaccgatttgaccaacccttatgccggatatgtgctgaacctacaaaagcttaaagcctataaccagtttatgtttccgctggcaatggcgctgaaccgtgagttgtgaggtcggaagatggtagcggtaacagccgcatggaacaagccgttaccgtcccggattttattgtttgccctctttttctgttatgaacgcaagataggcgggcacggccttatggcatccggtaaagttcggtgtccggcggcccttgattttccggaaactgatggttccgttcctgtcaatgcctcttacatgcctgttgaatgtccctttggttctgatatggatgtcaaaaccatcccttccggtgatttcaaggaacattcctcccgtgatccgttccccgtccaggaatttctgtttctgttcatcgagcagcagctgatgttgctcttcccgcgctctgcgcttttccgcctctttctcttcccgctccctgcgtttctgttcctgcttccttttgtatgcctcacgggcttgcagcaagggtgcggtgtcgagttcgagggcattgaacacacggatggagatcaatctgacgaaggctcctctttccgcgccctgaagcgtatccgcgatccagttcctgcaataggcggcggcttcctccctgcggccttctcctttgaggaaccggcgtgaatactgcccgctggaaaaataaacgttttcaatccggcagaccacatggaaacagtcatcgtcctcattcccatattcgttctttctagacagggagagatatacattctctgcgtacggctccagttccatataaggagccacgacggtattcccgtcagacttgtacttgaatacttttgctttcatactatcgttcagtttgtcggttgttgcatatttcatctatgatctctttcccgcttctttcacccttcaggaaggcaaggaagcgcctcaaaaagagccgggcacagtcagttccctgttgggagctttcaccgtctttggtagcgcataccgcaaaacgccccagtccgaaactgtcctgttgcggtatgatgtggtaagacaagtcctcgcttgcattgatgtgcaacccacgacggaaaacatagaaagttttcgggattcttctttcggtatcgatttccatacgcttgtaaccgtgatgttccaataaccggatcagttccctgtttgtcggaattgtatgtccgatccagtccggccagcttatattttctattatgtgtccgtaattgtcatataatatgttgaactgttcctggtattcatcgtaaaattccccgttcccgttgcacatttcctccaacgcgatgccgtttttacggacaagggcaaggtcgcccagtccacacgcgatttcattgagtagcgtgcgttcctcatccctgtcttttgccgttccgtaaattctaagcagggaataccggtgtagcgccgaacgggatggcatatccagtttttcccatatctcatcgtttcctatagcctgtctggtgttttccggaagtccgtaccaccacttgtccaaattgtttgtatccataatttctgaatcagattgttttcaaattctgttttgagtaccatgcctgatacgcggcggcatactcctgacgttcccgctccagggaatctctcatctccggggtgtacccgagcaggcggatgtatcctccgttataaccggtgagttcgcaccttattccggctccctccagtttgtcgatgcgtttttgggccatttttgcgcttgaatattccttcggccaaaaatagagttcgccccgtgagccgaaacagtcttcccccagaattatttccccggcatacttccggctttcgatgaagccgaaacgcgctttgcccaatgcccggcgcattgccttgtgtgccggaccttccggatgcttgaatacctccggtttgtctttgctgtcgagtctgggcggttccaccttgtacggctgtttgtaacttccgattccaagtgtcaggtaaaagttggtgtgaaaatagtccgtcatggggtcgctgtcgtcgaaattgtacgacatgatgaaatcgcagatattcatcattacatcttttgccctgtccgtcaaggatttgtatgaagcgatatgatggtggttgacatcgccttgaacttttccggactctttggtgaacgcctcgaaatccgctttcatcaaccggatatggatggagtggcaattctcccgtctgacagagaacttgtatcccggataggtctccttgagccatgcccgtaccagtgccacgatttccggcgcatgctgccccttgtaattgcggcctttccagcggtattcgttatacacatactcggtgtattcctttgccgtggctcccgaatagtcatattcatatccggttgaagtcgcgggaatatccggtttgtctttccaagcctcaaaaagccttccaaactcggtgttcacctgttgcatgatcgcagtgtcgccacccttgtccgggtggtgctccaatgccagccggcggtattctttcttcaagtccgccagagagtgtatgttctgaaaataagtcatagccatgagttttttatgcccctgcgaggcggttgataaaatattcccggtagtcaaggtcaagaccgaggttgagacaggccgtttccatgtcatcttccctcaaatcatctgcctcctgcaattcgcgcagataccggatttcggagtccaggtactcccgtgcttccgtttgactgcaaccgcatgagctgccgatcagactgataatgtttcctcgcatactgtttgatttttggggttactgttcctttttctgaagtgtcgtccgtcatatatcgagacggcccgttccaccagaatcctgcggttgtcttccgagagttccaggtagaaccgttccgccgcgccgaatgtgcccttgtctgtcgccacgcaccatttttcccagaaatgcgggtacatgccgccatacacggctttgcgttcctcctcgctccaggcgttccacatgtagtagaagaaactggagacggtattttccgcttgatatttcatgattcttttcatttgattgattgttgatgccagattcattgcccggaaggattaccggatattcaatattgcgctaaagacatgtgggtcaagcctgtaaaacgtcggaaggttaagtgtgaccatcgggtagcttacccagccgctctgacgtctataacctgtatcctcagctaatttgttggacagaaggaactccatggcatcaggattgttgttgatgtccacgaataccctgtcaggcagtgagaatgccgccttatcttctaagttgaccgtcaggaccgtgtatatctcatgggtcacgggatctttcagagacaatgccggccagccgttatggtacatttcaatcacgattgagagacggctttcctgatacaggaaagtctcttccatggacggatggtcgcatttgacaatttcaaaatcatcctcccctttggtaaatgtcaccatcggataggatacatcgacaaaacattcctcttcccggtaacagagatgttcttttccctctgaacggattatagccaatcgggtgttcatattcgtaactggttttaaaattattgacttgcaagttaattggccggcattcacctgcctgtttctttaaacgtgtgattgtcaccgcctgcggacatttgggagagttgctgtctcaccgccttgattttcccaatcagttcgtcctcccttcggaatgagggggtacatttggtacgcctcatcccggctccccaggggatgccgccgcacacttttctcaggcgtgccttttcgctttccagagccgactccagacgggccagcctgcgtcgcaacgattcttcggtcacagttctcatgatctcattgttttttttgtatggtgacgggtcggaaagacagtcaccataccgtcgttatgtgtcacgttatattttagctttttcccttttgatgcctctcaggacgtacaacaggtgcaggaacagctccctgtcgtaaatccggaagaagaacggctcgcctgtttctctgaccgttccggtaaacgacacggactcccggttcacgggatattggaggaagttgccatttgccagcagggtgtgctttttcttcatcacttcgcctaggaacttgtccatatcgtcgtttccctcatagccggagaagtagaggaaatgatgacggcgcaggcttcgcaggattttggcggtttccagccttacatccctgcctgacgattcgtccgttcctctcatcaggttgcagatgaacttcttctcgccatttatgtcaagaaacagataaggaactataattatagaggcatgccgtgcgtggtcagagatgaccatcggcttttctttcaggatgtctcctttgaaggtaatgttccggtaatggttgtccatctgccgttccagttcctttcttggcgtggtaacggagcggagtcccgtgaagtagcgtccgcccgcccggaagcagaaccggtagatgtccgcatgataaggctctcccatgaaaaagaaattccgggtatggcggatggggggcaagacatccatgtagtcgaaatatctttcttccgtaatctcactgaacggggcgcagagggattgcaagtagatgcgtatcatcttgcggacggtatttctggacacggctatgaggtacgggttcttttccctgtccctcagttcctccaatgtctcatgatggtagtcgccatgtattccgtcagacatggtggtcacgcagctgccgtcaaaactgcgtgaatcaactacgaatttcagtttgtcgttattcatggttcagatgttttgaaggttcaacactctcttggcggcactgagggcattggaggtgagctgccgttgccatgccttgtttctgggtgaccagcggaatccggaggatttcagtttctttcgtctgttgtcttcgggaatcctgtcaaacaggatctgaaggcggtcttccccatagttccatacaagtgtcccgccctcgaacggcacttccttgttttcccggctttgcaccgctttcagcctttcgcgcatccgttccgcaagttccggcaattggaagaatttgtttcttggggtgatgacgggtttccttacccttgcgttatattcggaaatgaagtccacggccctgcggacgatttccacttccccgtgattggcgaaggtggataccttgttcaggatgctgctgacgaacagggcacggttataaccccggcattgtccggtgtcaatcccgtggatggtgtcggcgctgctcttgatgtcgcgtttgagcgtctgccatgccttttccagtttttcttcctccggtcgtgcggcttcatttttccgtctggcggcttcaagaaccttttgccgccaattgcggaactcctcgtagcggttctgatagcttctgttcgtattctcctgcctgtggtaatcgaatccgccccgtcccgtcaccatcgggttggcgcagcgtgagagggccgagagctgggcggatagctttttccggtaggcggcgatgtatgtatcccgtttctcttcctgcatgagttgcaggtcgttgtgcagctcctccccgtaaatcatgatgtccgtctcgccacgaatctccgggtcgaaggaactccaggcgtatgcgtcgcaagcctgtttccacatatcctccagatagccaggatgtttgaacgctacggcttcccagtctttgaagtccctggaatgcaattcattccgatcttccggatttccgtacaggtgtacatagttgcccgttccatgatgctcctttctgaaatggaacggtacgggaggatggtccgtacccttttcccggatcatcgtgacccggtgcgcattctctgcggtaaggcccgttacttgttcttcccggacctttgctgttgttgtttcagtcataaccgttgccattcataaattatttctaccagttcttcgtccgccagtttttggatttcctcgtccgagcaatagcaggcgatttcctcgtccagcttgaaagctgccgggtcaaggcttctgatgccgtccagcagttccggcaccaggctgtctgcggcaaccgtatagcttccgtccctgccttgcaccttccgtgcgggatagctcctttcccgataaaccaacattctcattttcggattggcaccctgctgtcctttgtggactttgcttgttgtctctctgttcataccttcatttttttagtttgtttgacatgatcggctccgtggagccggtttttcggtttcttacttgccggactgtcctttgccggggattgcgcaaggcttggcaaaagaaaataccgcagcgaagcgaggatgattttcttttagccaaccagcccctgaaaggggccgccttgcgcaatcaacccggcaaagggctatatttgcaggtaagaaattgaaagaatggcaggattttcaatttgtcggatacaatgttgtaataagcaaatttaaaagcatacaacgaaggtttttcaaatattttccaaactatcggatatcaatatcatatcgtaaaacaagcgaaggcgtggcattccagaataaatacatatcttcgcgtcaaaggtgattgaaatgaatacattctctgcttttgatacgggtgtcatggtagctctcttgctgggtattgagtttcttaggagtgatatccaaacaattctctattgtaaaagagacgatcccgggatttttaagagctgcctgtatacattgtttatattgttggcaagtctttattccattgtggccggagccatgcttaaccccgagcccgtacccgtttatgaattgatacccggttttcaaataggagtttatggttctttttttttgtttatatttcttgttatcgccggtctttaccgtaaaatattacctctcgtccttttggggtacgctatggtatatgtaatcggtgtactgataccgttacttggatatgtagtgtccatgatgaattatttcgccagtacaggatgattatgaagactaaagatgttttccagagaaaatggataacagacagtataacaaaaagaaggtatcctttttcagataccttcaatgacgggccggttgtatatttaccattccagacgttccttcacattgttcatcgcctctttcaggctgctgttcatgacccgagcataatgctgcgtcatacgtgtggaggcatggccgagcatgacggacacgtcctgcaagggtacattgttggcgagcgtgacggtggttccgaaagtgtgcctggcaacgtgcgtggtcaggtttttctttatgccgcagaaatcggcgatttccttgaggtagctgttcattttctggttgcacatgacaggcaggcagcatcctttctttatgcagaccggatgttccctgtatttctctaatatggccagtggaacgggcagcagcgggatgttgctgatggaagacgcttttctgcggtgttccaacttgacccttcccttccttatccaccagtccccgagattgtcctgtaccaggttttcaccactcagagtggcgacatcggagaacgccagaccggtgaagcacgcgaagacaaagacatccctgaccagttcaagccgtggaatggtgaatttcttttttattacggtttgcaactcgtcgtaggtcaggaataccggatcggtctcgtcctgctccatcttgtaaccgtaaaagggattcttgcgcatccattcctttgccaatgccatattggtaaatttcttgaagcatttcatataacggactatcgtgttccggcacagtcccgcctccgttttcaggtagatgtcaaacgcacggatgaactccggtgtcagctcatggaaagtgacatcctcctttccgtaataagaggggatgagcagctgtaatttcttcaccacgttcttataccggttgattgtgacgggagagtagtctatacccgccagtgtttccatttctttgatgccttccctcatggtgccgagcagtgtacgcatttcggtgtctttcccgaaaacacgtttaagaatcagttttggggtaatcagggcctgttccaataccagttccttgtgtttttccaaggcgcgtgcgtgcagttcggcaatataggcgttcagtgccactgatgccctgtccctgcctttactgcatcctttggcggcgttccataagttcaggggtacgcttctttggatacgtacatcgtcatagtctccattgatggttatccgcatcaataccggtgcctcaccgtttttcaacaatttcgttttaagcacgaaaaacagaatgttcattgttccttgtttcatcacttttgttttttgaggtgttacattcaattgtttcgtcaaaaccggatggcatgaggatatggagcgaaatgttaaattcggtggcttttttgagggacttgtggaaaagccataaaaatcccatttttttcaggttcgaattgccttttgtatcccgggttcgattccttttttttatcccgatgggaaataccgaatttttaaatttctttcacatttctgactccatccggtcatgtgtgcaaaattactttttcacaccggagattgaaattgtcaaacaattgaaaaacaatgaagtatggtacatatttatggctttttcaaaagccttaaaaaaagccactgaattggcgaaatccaacttcacaaatatgtagcggaatgcgtagtgagggtaaaaaaagaacccttgaactatctctaattcaagggttttctaaaattgaaaagctttttggtggtgccaccagcaccactttttaattaatcttattttatctcactttatcatattttacttacatatctaatattcaatcatatatccaatttacacaagcaagtaagataaaataaaattaaaatatgcagtatcaatgtagtatcaactgaaagtttgttacatttgtcatgtaattgataaacatacaaatatcatgagtaactattttttacggacaaaaaaagaaaaagggacggcaagcgtctatcttcgggtacaaaaaaggaatcctaagctgaacatcttagtttgtagcaaggtttccgttgatatccaacaatgggacaaggttacgcaagacgtcgccaaatggaatgattattgcaaaacacaagacggaagaaaagtcaaagaaacactggattcgatttcttcggcaatagacaatctcatttcacaggggatttatgacaaggcaaggatcgatgaagtggttgaggatgtcgttttcaggaaagaaagagagagacaacgcattcaagaagaagaagaacgacaagagcaagaaaggctaagactaatcaaggaacaggaggaagaagccagaaaggctgatgtcattcttttcttggaaaactttctggaaggcataaaaaatggcaggatcaaaaacaaagcggaaaactacacccccaatacttgtaaagtatggagcaactttcttggtatcctaaaacgttttatccaaatatatccttttacttggaaagatataaacaaggcattggctgaccgtttcgtttctttcatggagaaagacggttacatggtaacatctatcaacaaatacattgtttgtttcaaggctatgattcaaaatgcaatggaccaggaactacataacaatcttattgcattgagagcattcagtaaaaaaaagatacaggaaacggataaagccaaagaaatctatctgaccaaagcagaactacaagcactgtatgaaatgccgttggaaggattaaaagacaaggtacgcgatgtttttcttgttggatgctatacttgtcagcgtttcagtgattatgcccgtttagaaaaggaaaatttcaccaagactgccaaaggtaccaaagtagttcgtatcgttcaggaaaagaccggcaatgatgtcgtgatacctattttgaacgataatctactgcatatagcggaaaaatacgggtatgacataccaaaagttaatgatgtcatattaaatcgctatatcaaacaaatattgaaagagctatcctctaccgttccatctttagccagaaaggaacgtactctcttgacaatgaaagaacgtgaaaaggaaaaacaagggcttgtctcttttgaacgggataacaaaggaaatgttatcaaaccgcgatacgaattagtgagcagtcatacggcaagacgtagcggaataacgaatctgtatcttagtgggaattttgatacataccagatgatgagcatatccggtcacagagatgaaaaaacgttctatgagtatataaagctaagttcggatgaggtggcagatagtatcgccaagaaaatggatgaacgaaaagaggccataagcaatgagagactattctaataatattaacatcaaaaatatacgatatcatgtcagcactaaaaaattattgtgataaaatccatgagtatatacgcctatatggagaagactatatttggcatattggatggcaaattgaacctataccctcaaaacaggattatcgacgcgatcacaaacaggaaacgaaagaacacaaagtctttaaaggggatcctgagcgacttgaacagatcggccagaaatgttttgacgcacgtcaagaatgtttcaatgaaataggaaaagacctcatattgtgtggaacccctgaggctaaagaaagatatgcaaaattggtcatagaagatatgtcgtatataacactaaatcatccaatcgcacagtatgacaaatttaaaagtgtggtacaacatgatgtatttggtccaattctcggtctatttaagaatgaaaacataaacatttctccatttcttgatatgcacagggaattggacaaggacctgctttcattttttatgtctgatgagaatgagataatagattctgaaaaaaagcgtgagcaaacaaactttgaggatattttctttcccgaacataaagagcatattccagacttcatcaaaaagttagaagataagacaatcattaaagacggcatattcaatcatcgtaagaagaaccatttagccaagttaatctgctatatgcaagacaaaaagatcattaagaaagactgcgatcacatttctcttgcaagatgcttctatggattctttggaaaggaaatagaggaaaaggcagggaagaacatagtaacaataagcaatgtgcgaaaaaccttaattagaggcatagagggactttctgaggaagagaaaagcgattttgaccttatttgttctatttttatttcccgaagggaataacgggaaaaacgggaatcacgaactcatgatctttgtggcatgacttttaaaaactaaagatcatggataaaaatgtttttttatggggtttaacccctcaagagtttcaaaaaatgctcatcaatgcattggagcaagttattgaacctttaaagcctgctaaagagagtaggtcaatagaactactcacacgcaaggagacagcagaacttttgcgtacatccttgcctaccttagctaaatggagtgaacaaggcatcatccatgctatctctatgggaggacggatatattactctctatctgaaattcagaatattctggaaaagaaaggaggcaagcatgtatgatactgtaaaatttcgcttaaattgtttggagaaggagataagatatctcctctccaaatttgattcccaacgagatacaaatgttcacgataaatgcaggttctatcaattggataatttgggaattaatatctacaattcattcattaccatagaaggaagcctcgccaaattctattatgggaataacttacatttgttgggaagagaagagatcaagcaagccatagacttacttagtgacattttgcagttggatataaactctgctcatgttacacgtatagatatagcagcagattttgagatgtctcataataccaaagaatattttccatttttaggtaactatccacggcataagagagatttatgtaaggggactacactttattataaatcagcaagtcatacttgtaccttttacgacaaaggaaaggagtcacaaggtaaaaaaggcgcagaaagttgtttgttaaggttcgagagtagatggtttaaaccctcatcatctacgcagttggactggaaaaacataacaggtgagactctatcggacccccatttttaccaagaaatcattcagctatggggagaaaaatattttgatatcgaaaaaaggaatatcccgatcagtaatcctagcatccccataaatactccaaagaaggcaacagagtatcttctcaatgccttgttatacttaccttcgtttttgccttcatctacaaagttcatagaagaaacgaagaggtttttaatagaacagttaaatactcaaagcaggagccgatttaacaagatgctaagtgaactcaatgagaatttttctctaaacgaaagatctccactgatggaagaacttgattgtaagatcagagatcgtatctcattagaattaggcaatctctaataataaggtgaacttataatcaaatattgatatctaggagtatatgaacgatactattctatacatctcgtatccccacatagggactattttaagctatatcaaagtcatattggataagttgtaagacaactcgacacatatgcttaaaacagcccaaaacaagggaaaaatccaatgtcggcatatggagatcggttctgatgttgcaggcaagtaacggcggaagaggcagcaggagcacccagccatagaggggacaggcggtcggcgaaggctgccccctctgggtgccgggactgcctgtttctttctggaacgcatgtcggctgttaacggtaccagacaagaacatactttcattgtttgatcatcttgcatataaccaaaagtcaatccaaagagccaagctattgcagaactgttttagcttgtatttgcatgaagtttgtttatttggacttttggaatacgatcaggagaaaatttgttgttattggtacccctttatcccgttttgaacataaaaaatccagccaaaagcccatagatatcgcttacagaagggacacaatcggcattctttgccgttttttcttaccggtcaaaaatgtttttatttttcccctatttttacgctcttgtatagagaaaaaacgacttttcgtgcaaaaaaacagggggaagtaaccccaaaaacgggtaatgaacgggggtggttcatggaaggtaggtatatacggaccttacataaaaaacttacccaatatctagactatcgtgcctaaatgcagatagaagcattataaggctatttcttatgccagagaagaaaggtaccaccaaagagacaaatatcgtcaggagcaattaaaacaataaaatataaggttttgcattgcacagataatattaatgttttacctttgcagcgtattggaaataacgtagaagcgtttcgatattatcttgttctgaaatctcgacaatttcaacacttcaagataataggcaaatggttcctacgcttatgttttgtcgtatatctgcctttgacaggtagactatatagatacataaagcgtgggatcattgttctattattgaagtgtgggcagtcgagagcctcagaacagtagtagacgatggttcccacgctttttttattgacacacctgtaggggacaagggggaaaaatagaaattatggaatgcttagttaatcttttatgtactctcttaattacctcagtaagcataaaaaataacgtttctcaaatattattaagaacgacagacttccaaaatagctattgggatattttaataattttaataattgtaatttttgctgtaggtatacttgcattatgtgatctagcctttcttgaagaggatagacgttatagaaaaaaaactgcatccacagaacctgaaaagaaatggatatcttgtgatagtgtcaaaagcactaatactaataattcacgtattatacaagatatgcacaaaatagcatctcctattaatgtattaggaaaacaaatgggagatttggaaaaagtcacaacttttatatctactctcatagaagaaggtataaagaatttttcctttgaaggtctttcaaaagctcaacaattagagatttttttgttcgatgcgtgtatggccaaaaatcttcttttagcaaaagaaaagatccctaacgtttatgttccaaaaatagacaaaacgatcaattctgcatatcgggacttaaaagataagctaggaactaaaatggatgaatttcttgacacaaagactctgatcgaaatcagaactccattttatttgaatgatctacaaggtttgatagagagcagcacagagatgtatatgccatatagcctgtatttctttatttgtgaggcacctttggaatctatcctaaatagggagaaagttaccgaagaaataaagagaatccaatcagatacaaggatattagagaaaatctttcttttcatgaaagcttttgagcctcattataattggctattagatcgaataaactctttttaatcataaatcttcaaaaatagctctagtaaaaaattttttcaaacataaatactgtatagaaaggagaaaaaagatgataaacacgattgggaatatatggaataatcttatcgagtggtttaaagatcgttcagatcgtaatcaattggtatataatttcaattatatggcacgagaggctttcgttcaaggaatagcaccaaccatgttaaaagccagtataacaaaaggagttcgtgaatataggcacgtattttcaaattggatgtacacaggtttccgtattcaagctttagctggacgggcattgagcaaagacgagatgatgcagataggtcaagtcgtacttgcagattccttattagtcaggcggctggttgctttaggttgggatacgttagaagtttgtgatgatattggagtttatgggtgccgatggaaactaatagatcatgcacatatagggttaatgttgaatcaaaataatatgtaaaatggataatttagttgtagacagtatgtcagtcagtaatcaagcagtccatactggaaatatctggttttggattgctatcatagaagtattcgtaattctatatttagcaagtaggcttatatttcatcctcaaaagggacatataaaagtaaaagagcaactgaaatcggcccctatcaacttaggtaatacgataaatagcgctttcaattcgaaaccattgtatgataaactgaaagtaaaatgtcatcctgacaggtttgccaacacacctttgcaggataaagcgaatgaactatttcaagaaatacaggctaataagtacaactacgacaagttgaaagagttggaagagaaggcaatcatggttctaaatataaacttttaaataatgattaaatatggaaaaaataggatggattatcttacaggcaaatcaagtggatgtagcatctaaggtttttattcttttattaatggctataattagttatggcataggcagcattggcagtaagcgaaaaattgggtttggctgggcttttgccttttcattttttttaagtccaataataggtcttatcatcgttctttgttctaagaagaaagatgtagagtttattgatatcgataaaaaataatcagctatgaagatcattggaattgtattattattgattggtattttaaatatccctgttgcttttctaagtggatataatcctataggaggaataatgtggactctaatcgggggataccttatctcacgagccaacaagaagcaacaagataaagaggaccgagataaatggatgaacggggaggcgtaatcaccttaggataagccatgtatattctgataataatcatataaatatactattttatgaaaaataagaagaatgtaaaaatcgtttttgccttaataggaattacgctttctgtatttgcttattacatatatacggaaaagcaaatagtacaatcatacaatcatgcgttttataaatgttttttttgcaatttaagagtagtagaagatattgaaatcatatatattattgaaggataaaaatgagtactagtaaaagatatacatgtcttgctatattgtttgtgattatattattagaatatattgacaatctaaacaatcgatatagatttagagaccatcatacaataggacggatcacaggaacttcatttcctgcatttattgttcgtgaatataaagaaggaaagagaagttttacaggagatcatacagatatacttctaattgaatttagggaaataccttctgatgtattttataaatcattagacagtttgattaatgaatctaattcaggatggtcagtatcagagaatcaatactcttattctattgtatggggtaatggatttcctgccccaaaaggagaaaatgatgaggatgatggttttattgatataactctggaaaaagggaaaaagctggctaaaatcaggtacggtagttggtagacagggacgtgtcactgtaaaataaaacctgtaagggtatttttgacaattggtttacgtcagaaacatatgaaaaattagtttaatgaatcatggcattagttagtagataaaatcttattgtaacatttttattatccaacaaaattgttaccataatgtccatatttaacgctatttcgataaaaaatgtagatgtatatttttatgaaataccttgttattaccatccttcgtgtgcatgacacatttttttacagttttgtaagaagaatagaatttattctactaggttcttcccattaaatattgttttagtgagggggagattgtgggaagtggtatattgcatctttcttatatatatttaaatcgagtattataacatctatatttattaaaatttgattgatgcaattatctatatttttgagataaaaaacagtaaatatgattttgcttcgtaaaagataattatgctgtaaagtcttttcagttaatatattacacaaatgcaaccaaagttttattttaaatacaaaaagctaattaaatatgtgttagggctattgcttataggtttaaccttctttgttactatatctttagaaaaatctgttataatagacgtttcagaagtaggaacgttgaattctctattaagtaaatacagaaaagagaatattgattctttagttgtaacaggtaagatcaatgaaatggatatgattactattcagtctactcagatagatacgaacaaaatcatctcacaagaaaaaaagcagaaagcctatattgcacaagaatttaaggatttaaattttcctcgtatatacattaaatacaaacaacctgtaaacggctatacggtaaaagtgctatggatgccttatacatataacggaaaaacatgtgaagcaggaaaggcagttctatattttgaaagtgaggataatcatttttatattcaaactagatcttatagtgatacagctgtttattcacatactaatttaaaagatggtgatattttgttttgggattacactcctaagaagaaagatgaaattctttctgaatattcacctttctttttttcagatgtagactttgacggagaagatgaacttctaatcaatgaacatagaggaggtagcagaggtactaattcttatgaggtttataaaatacacccttattatgctgaaattataaaggatgcaccttttgctaatttagagaatggcaacacagagtttgatttaaaaaataaaacgataacaagtagtttctcagacagtgcttttgaatctgttacatatatctataaagcaattaagcaagaaaaaattgagtatggtgatcctgaaccatgctataaattcgaattagtaaaagtagagttttattatcgacacacagaatgtaatgagtataaagtctatatcaaagatggatataagtacaaattaataaaagatgaaataataccaattaatcaaaaggacaactatcccaaaaagagacaataaaagtattgagaacaagtatttcgagttgtagccagaatcaaagtatgtatatcatagaacaaatacaagatgccatttattttctctcattgggaattgtaggatttgtcatagtcagcttgggacttatgcttcttatcctcatcctagcttcttatctactaagttttgagataatagtaacgaatgaggactttataagaactttagtcataaaactaatagcttggggatggacattgtttgattggctttggattctattaaaagcgattatgagatccagggtattgttggctatagtgttctttggttatgttgcatatatcattatttatggttagaatttgtgctgatataaatcatttgcttcataacgcaaaaatgtatatatttgtacatcctcatggctcatgaggtttatcaattacgaataaggccttatttccgggatcggataataaggcctttattttgtgaagtatcaaagtagtatcaatttccaatagccgagataaagcaaaaatgctaaccaccttattgtcagcgattagcattttcaccaagtggtgccaccaggaatcgaaccttttgcttcggtttattctaactccttgagtgactgcacattttttgctttatcttttatgaaaaccattgaattggccttacgctaaattcattgtttttctttactaatctgacaaaatttgtctctttgacactgcaaatataatacacaggttcgatttctgcaaatattttcattccttttaattatagttttcaacaagagaaaaaaataaaaacatgtgctaaatcaaatgcattaagaatttatttattgtttggggtgttgactttaaagttggaaattttgcttcgcaaatcattagaaagatataccccttgaatctttattttgcatgaataaaccaaaagcactaaaagagcaaaaatacaaatgacgactatttcactaggcgccaaaaagtttggaactgacttgggcatgaaggcacctgcaaagagatctactaaacataagattatagctcccacctttcctaaagcactctttacctttcttgatttttgtatctctatatcgcttacaatttgtgcaatcacagtattattggttttcattgcatattctttcaacgtaaatatcgaaacttcttcattattaaatagaaaaatatatttcccaattaagggtactgctagtgtacataatgcaaagaggatacaagtaaaaaatttcacagtccaaatacagacaatacctaatattacgaatggaatcaggtttattagagttaaatcctgaaacgtaattccaggttctttttggggacaacacacacctaaatacaaatctgtaaacaccaatagaataaggaaatttgtccatatatccgtatcataaatcttgtggttgtcaaataacgcaatcaaatctttcatgttgttcataaatacttttttaaattaatagtttatagtaaagcggcagtcaacattttaaatttccactgtattaaaatagagcctatactgaaaaggaacagggctattggttatcaataccctaaaaccttattcgatataatgtctacagattataccattcaaatatattatgtgttattggattttacaaatatacagatactattcagaatgtcataacttctccataaatattattttgtacagtttttttacttataattcatgcctttatcatactttgcggcattgctgcatgaaggaggtgtgcatgccaaaacagaaaagtttttgagccattcatgtaaaaaggatatacaggatgtcatctgatgacttttaatgacatctgatgacactgctttttatgtttcggatataaagcggttctttgtcgtgtattaatagtgaactaatccatgaaaatgagatgccatgaacatacaagaagcaaagaacatcaggcttgttgattttttagccggattcggatacaagccggtaatacagcgtgggaacagcgtatggtacaaatcgcccttcaggacggaaaaggaagcctctttcaaggttgacctccataaggaattgtggtatgatttcggtctggggaagggaggggatattataacgttggccaaggagatttatcggacacaagatataggttatgtactacagtgtattgaggataaaagagccgtactgaaaccggttactgtttcctgtccgtttgaaaaggcatatcccgcctttcaagatttgaaaatcattcctcttgccaaccggatactgcttacttatctgaaggaacggtgcattgatctggaaactgcccgaaaaatatgcagggaagcccattttaaacggaatgggaagaattattttgccatcgctttccctaatatttccggagggtacgaaatcaggaacaggtatttcaaggcttgtattgctcccaaggacatcagtcgcatcattagcacgccggaaagcaggatttgctatatttttgaggggtttatggattttctgtctttcagaccggcttttccatctttggaagagggggattatatagtgttgaattctgtcagtaacttacagaaggctttttctttcctttcacaatatgacggcatccgttgctgtctggataatgataccgccgggaaaaatgcggtgcaggcattaaaggacaaatacggaatccgtatatgcgatttttcgcatgaatattccggatataaggatctgaatgaatatttgtgcaggaagaacaatctgctccatatctaatagatgtattgaaaagactgcctgatgatatacccttgtttctttcctgtcatatgtggcaggaggaaacaagggtgatttttcatgtggtgatactatgttaatagtagaatgtggtcagatgcgttttatggtcttttacaatctttacttcatgcatctgtccgtatatctcacgcatggataccggacaatccatcttttcccattcttccggggaaatcctcatgtcggaatgcctgaaacacagcatgaccatttcctgagaatcctcttctgcgaatatggtaccttcatggtcgttgacaaactgtttgagtccatcctcatccttacaggatatttctccgacgtacatatcctcgctcggccgggtgtttttgcggatatggattttgaaccattcccggctttccggctgttcaggtgcgccacactcccacagggctattttcgcatcgtagtaaacctccccgttttcacatgccccgtaatgcccccaatgcttgaaacggccggtagtccatgccttgaaccttacatcgcctgcctttaccaacagacactcaccgccatgcatatcgcatttgataccctctttgtcacgggacacgaatggaacacgggaaaaatcccggagtataatgttatctccatatacggcatctataaagaacagccgggaacgctcaccataaccggaaacaaagaacaggttgtctcctgtccgtggatactggccggagcgtgtcttttcgatgtgttccaccatggtattcactttatctatatcttcctgtacaagtccatatatccgatcataccagtagttcaggcggatgaaagtttctttgctatacttgtttgttgtctgaatcataatttccttattttgtgattaaacatttccggctttggcaaagccggtatttctatctcttacatgtcagacatttgtcttttgctctgatagtgcaaggcttggcgaaaaaataccgcagcgaagcgaggatgattttttcagccaaccagtccgaaggaccgccttgcgcatcagaagcaaaaggctacctttacatgtaagaaatagaaatgctgaccgatatatgattccaaaataaaaaaacgtataatctgccggttctgtaataagaaagccatgaaaccctctctttttatcgtttccatgactttcttatgtttatgtcgtgatacttggaaacgggtattaccaatgatcaaatgtttccaccctgtttttttccaacagaacaagaatgtccttttccttatataataatttgcctcctactttgtaatagggcagcctgccgttcattctgtaatcagccagcgtccttcgtgtcagcttcaatttctccgccaactcgctgtcggtaatgtaacgctctccgttcaggaccggacgaaggtttttctcctgatcatccagcattttggacagggtgcttatgttccgaaaaaaacgtataatctcagggctttctttggtcagtatgaattgagtcataaggattcgggggttacatggtgaatactgttttccaaataacgtataatatcctgacgcctgtaatataccttgcggtctatatggctgtaagggataatcctgcttctccgaagttgcaacagctttcggggcgagacattcataagcatacacgcttcctggttatcaatccagtcatccatactacagatgcctcctccgcatgtttcacgcattctcttttcaacggcttccaaagcctcattcatttccatgaatgccttagcttcgatacatacaaattccataaactctgctttttttgtccggcacgaaaatacgggaagtaaaagtcatgggcaaaaggatgtcatcaaacggcatcagatgtcatcagatgtcagagaccgctctgtttggggaagcaaattaaaagaatggctaaaagtctgtttctttaccggaaaaacagtatttttatcccggacaatctgtccgaaaataaaaaaacaggaaatatggaactgataatcaatgcaacattattactaacggctatcgttctctggatatacggacaatactggagaaaaaagtgcggcaaggtgctatgccaatatgcagcagcctacgatgagcgggaagacagggagaaaccgctacgtcaagccatcatagcaggaaatcctcatgcaccgctgttatatgcgctgacttgtcctgagctgtttgataaagtccgtccgttgcgattgttctcattcgggagcattcgctgcgtgtttgccggctattattttcccaaacgctttgaaagctggctttgtgatgaccagttggcattcgtgcaaaaagtatatgatttcaaggatggaaaagacagctgtacggaatatttttcacaagcattcctgcttctttccactgatgaggatattactgccatgtttatgccgtgcagcacatcagaccgctattacagacgtttctcaggtattgccggttttctggaaacgcatggctatgtccgttcaggactggatttaatatgcattacggaaagcagggagtgtaaacacgcctcagaaaaacgctctgaaataaataccgccaactatatgatgtcaaacgatctgtacggaaagcgcgtggtgattgtcgatgatttgctgaccagcggatccagcctgatggaatacgcccataatctggaaagggccggtgccaaagtggaaggtgctgtatttcttgcccgtacctttcagatgccttcgccggcaaaagtaaaacgcctggtatggaaacgccatctatcagtcctgatccggagaaggtctgacgacctgtaaattgtaaagtttacattcggattttacaattttacacctcgaatttttacatttcaatttcccctatactatttttatatctgtattttattgatttgcagtgttatataattccccgtccaatataaacggataatgtggcatacatttttcactgaacatggcatatactcttgaaagtgcgcacaagaaaagggtattccagtaataacctttaaaaagacaggagaaaattgccatgatgtatatagacaatgaagtgcttgaaaaaatgataatgaccatagtggaaggttttgaccgtatagaaaagaaactggacaggatgggacgcgtgaaggactgcctgaatggagacgagcttttggacaactatgacattgccaaactgctaaacgtgtcattgcggacagtcgcccgttacagggaaaaagggctgatccgttattaccagacggacgataacgggaaaaacttctacagaagctcggaaatacaggagtttttacagaaacgtgggaaaaaagataagggcgggaataccaacatgggaaagttatgctaactttgtttcataaacagttgttatgaagacaaatgccaattcaagatataccgttgcagtccttattgacggggataacgcatcctttgagaggatggaagatataatgggctttgtttcccgttacggggatgccgttgtgagacgaatttatggagactggacgaggaaagcgctttccgcatggaaggaaagtgccagggagcatggattcaggcttgtacaagcttcctcccatgttcccggaaagaacacgacggacattgcactggtcatagatgcgatggatattcttcgggacgggcaggtggactgtttctgcctggtggccagtgacggtgattacagcctgcttgcccaacggatacgggaagccggggtgaaagtgctgggatatggggaaggaaagaccccggtgtcattggtacggtcctgttccgtattcctgtatgccgaccggaaggaaagcaaggcagaggagaacactcccgaattctttatccgaagggatatggagtatttcgacaaggcttttgagcaggcggctgacggcaaagaagaggtttccctttcactgatcggcggtgcattgaaaaaaatgatgcccaaattcaaggtcaggagatatggatgcaagacattgggcaaactctatgaaaagttggaccggtatgagctggtcatgacggaaaagggagtggcaaatgccgtacggctgaaatattaaaccgcatagcaggagtgttccaaaacgtcagtttctcctatacatcgttttatgtatcaggagaaactgacgtttgtgttctataccgggatggggtttacccgtaatgtgtcaagattgagataggctccccggtagaacgttcttccttccctgagcatgcgccacaggacgtcgcatccgatttgtgccaacatggaattgatgaagagatcctgtttttgcaatgcctcagtcagcgagcagctcggtcctgaatccttctccctgatggtggaataagggacttcctccgttatgacgttcatcttgggtataggcaggtattcagtggaggagggctgcggtatcttgcttttgacattacctatcagtacttgtccggtggtctgggcattgccgaaatccatccagtatatcggtgatttctcgtcatcgtatgaacgttccctatgctttttcaaaaaacgccacagaccggtccgtgaacgggtggtgtccgtgcaggtgatgatgatattcgccaaaacggaatctgatgttcctgacggatagcattgcccttttgcttcccatgaaaagccgaaaaagcggttgatacgggttacaagtgccaccgccttgttcagtccgagctcggattcgctgaacaactggcgtccgatgttcgcttccgtgacagtatcggggtcaaaaaccgtcaagtgcaggcccggatgtccgagtgcctgcaatgcgatactcattcttgccagattggtggccacctgcgatccggttccgcccgcaccgattacgaaaacggttacgggatggtggggattgagcaggtatctgtctgtataatgaatctttttcatatcaataagtctttaagttgtctgtccataggtttcaattcgttatagtcaaacggattggtccgtgccttttccgtcaccgaaaccagattgctttcggtgggattcctgcttcctcccaaatgggaaaattcactgagccagaagcgtttttcccaatgctcaaggagttttgagaaagtcatgttttccggaggagtcaacgaggcatttcccaggcagacactgcttcccgttacattgaaaaacggggcaaggaaaagcgggctgtcttctgccggtgcttctcccttataggcaaaaatttccagtctgtcaccggaagccctgtaaatgacaccgggtacatggaatgtcccgtccggaatattcagcctttcggaaaagaacatctgccgttttcccggaggattgtaccagatgtacctctcgtgtcccttgcgtgtatcgcaccacagcatattggtggggattttcccatgcggtacatcctgccggttatccgtatagtattccacaagggagtccataaattcatacgtaacggggacggcagcctccatccggcctctgtcgttgatcggatgcagttcgagataatatgtcccgtgtccatagcggccatcactgtattcgtaagcaatcagtgccgctttgggaaccatcacctgttgaagtttcttagtcagttcattcatgtcattcgttttaaaagttgtcatcaatatagcctgtaaaacacaccaaccatctggaaagcctttccggatagtcatccatctgaaaaagactgtccgtttccggtgtcagtagcttgtaagtgaccggagtaagggcataggtttcctgataatccgaattcatataccccttgacacactccgccaatgtatcatcagcagaatagaccagtatgacctggctttccattcccaccgggggaaaatcgcattcctcttcataagcccaatcgtactggtagcctgtcaataccgggctttccggagtaatcaatgccatgccgtcctcaatcagttccaacagcttcagctctttttccttttttgtccggtaattccgcacagcctcctccaaagacttgcagaacggtttgcccgacatccgtctgagtgctttcatccgttttccagactgataggaatctgccagccgtttgttcgccctgatttccttcggggaagcatcggaatcccggtttccccagtcttccagttcttctatggcaaagtcataacaaaatgtctcagtaatatcgtacagtctgtggtgtcggacaaatagccggatgaactccctgacaatgttcttcaatgatgccgaaagccgttcggtaaaatcaaccggaatccaaaacaaagtaggttccggccagtcatgatggcggaacagacagaaatgcagccttccgtccttcttttccagattgatacactccggtacacactcttccataactctgtacaactcggtaatattcaggcgggggcaaccccctttcctgtatcggaaagggagttttatacccataagttccgcatatcttgatgccgaccggtagagatagtcaaaattttccggagtcgtgagattgaccggagaatcattatccatatcctgatgccaataatccggtgcaaggggtgtgattctaccggtcagaaaagcattgtgcttcccggtggcagaagtatccttcttttccgttccgaggttccccttcggatgtgggacgaacttactgagagaataatcagccgtgccagtccatccttggcttgttctgaaagctgtctgcatgtttccttatccttttttttcttgttcataccgcttaccctttcactccgatggttgtcttgaagcggtaaaccgccttgtcgtcctcccactcaggaccatgtaccgttgccgtagtcagttcagggtaggtcatggaatagaagtccatcacctcgtttacggacagttcgctgttcggatcatccaacacgagctccacggagtccttcttgaatttgaatactctctgcaatcctttgatttcaagtgccatattatttttcttttatagggtttaacaatataccatatccatttgtgccatatccgtcatgcggcattccttcggaaagtccggatattccgcataagggtcctccctgagtagctcccggtcatcctcgtaatccttgtcgaagttatacattgcagcctcctgcaccgttgcatactgtgacggagccggttgttgcatccagcgattgtccgccaattgcggttgcggcacctgtaccggttgatggaactggatttcttgcggttgtggagcagcctgctgaggaaccggttgcggtgcaggttgcctatattgtacgggctgtacttgcggctgtgcaacgggttgcggagccggggcaggctgttcgggcatggacatcggaacttgctcttcgctccggtattgtggcgtctgggctgccatcggttgtggagccgattgctgcaaggatggctgtggatcagttaccggcggctgtaccatgtcgaacagacttccctcggatgccttcttctgcacttccgccatttttttgtcaatgtccgcctgtttgtccggctgtgccagtaccttagcctgcctgagccaggtcaatgcttcggaataatgctttcctgccgtggcatcctcagctttcttcagcagtttttccatcttttcccgtttttcacgggcttccttggactccttttccaccgtaggcttggaggttttgctttgtgaaaccgcctgctctgcctgcttctcgaacgattccaggttggtaaggataccttgcgctttctgtacgggtgcaccgacagcctgcaggaatcctgcatccagttcttccggcgtaccgttcaggatgagcgggacaatgcgttcgccggcctttactcccgaccgtctgggaacgacggcaaccgtcagattgtcgtttacccgtctgatgttgatactcaggtctgtgcctgccgtaatcatttggttgattgcttgaaaaaacataatggtaaaatttaaaatgttatacataagtttccttgaaaaaatccttcaggattctctgcctgtccggattcgaggcgatgcctttcaacggttccagatagtagccgatacgtctgggcccgtctgtcgtacagggaggctgtcttttgacaggtgttgtccggtttgtggcaggccatgcagccggcatgaccggagccgaggatgtaaatgtgtaagttctcatatcttctgcatttgatggttatacaagcatgcccatgacaatcaggacaaggattgttttcaagacaaaggtgaatgtcctgaaggcgagacggaccagtgttccggacataaggaacaggacagacaggtacacgggaatgacgcccttgcagtaaagcaggcatattcccgtaagcagaaccagtgcgaccacttgcctgcagatgttttcgatgagtttcagtttcatgtctttaaatttttaagaatgaataatcccatcgggatatgttttcccgattttataggcctccggcccttggattgcctttttgcgcaaggcttggcaaaagaaaataccgcagcgaagcgaggatgattttcttttagccgaccagcccctgaaaggggccgccttgcggcaaaaacgaggcaatccaagacctttgccgcttaaaagcggaaaaacgtatcttgtacatatataaaaaagaggcacagaccccagtctgcacctcttctgttccgtaccttccgcccagccgtctatatggaaccatgcggctgtccatcttccgaaagtttccggaaaatctcaccggtaacctcatttaccgtttccaatacgccatccagaaattctttctgtgtgagttctccctgttcaatccgtgccagctccgcttcccagccggaggtgagggaggcgtcagccactttcattccgcgtaccgtttcatataaaagaagaccttttggggtcgggataatgtatttgcccgaataccggatatatttacgctccagaagcgtacggatgatattcgtgcgcgtggatgcggttcccagaccggtcttgtccatatagtccgccagttcctcatccgtataaggggcagcgggcagcgatttcctgtgtataaggctgcatcccgttaccggcagcttctcctcccgaaaaagttcagggggtacgggacagaggtcgttgtcttccgcgacaagccgttccctctgaaagataccgagccaccccgcttccagaatacggtatgtacggattcggaacttgcgtgcggcacagaccgcttcaaccgtcgtatattccaccttgcagggcggcatgaacgtttcaagcatcctgccgacaacaagggtgtaaaccagcctttcctccctgtccagttcccccggctgtatgccggtgatgacaatggcatgatgctccgccgtgtcctgatttccggttacgcctttccttgcagcaaggtcgatcataccggcatattgacggaattccttgccggacagcagcttttccataaccggaggcaacatgtcatacacgtctccgggcagcagacggctggaagtgcgcgggcaggagatcagttttttctcatacaggctttgggtaatttcctgcacccgtatggctgtcaggttatggtaacggttcgcatccttctgaagcccggtcaggttataaagggcaggtgcggtgatttcctcagtccggctgttgaccgccgtgatacgggcatatcctgccgccttgcagtcctcgtaaagttccagggcatcccggcggttgcagaaatcttccacatgccgcatctttattatcttcccgttcttgcagaggctgacgaatacgggccagctgtctgcgggaatgtgattttccctttccctgtaccgtccgcttatcgctgccaatacaggggtctgtacccttccaagcgagttgttcccgaaaccgaccgccttgcagacggcatagctcgaattgactccaagaagccagtcggccttgttgcggctgtctgccgccaaaaacaagttgtcgaacaggctgcagggacgaaggttttccattcctttggcaatggcttcgtccgtcaaggaggagatccacaggcggaggcaaggtttcctgcatcccaaaaaacgataaagataccggaacagcatttccccctcgcgggaagcgtcggttgccgcaacaatggtgtcacacgcatcgaacaccccggctatcaccttcaactggagcaccgcattgatgtcgggattccatcccgtgtccgtctttacatgccgtaccgtcagaaaaggaggcggcagcagggggaagttctcccgctccacccatgccgtaccggtatctttcggcatcgccagggaaagcatgttgccgtatgtccatgttaccatgtatccgtttccgctcatatatccgttctcttttctgtcagctcccaaaacccttgctatctctctgcccacattgggcttgtcagtcactatcgctatcatattctttttccttttgatgttccgtaccgtcaggaacggcacggaacgtgagttatacttattgtttcccggtcaaactgccgcctcctccttctgacggagaccgtttatttccataaccggtctgccgttgccgtcgggtaccagcttcagcgtggcatccattgtcaggctgaggaccgaaatatggagtttcagcggaacgatgcccgtttcctttccttgcagcaacagttccatgttgccttccgcttccagttgtttcttactgatacctgcggccttcagaccgtcccagtcgatatcttccgtcttataaatatgacgggtattctgatccgtattcatacgattcgtttttttaggtttgtatgattgattctgtttctctccgggcaggtctatactgcctgcgatgcacccttcttctgctcctgctgttgtccctgtgcggtctccgtctgtgcggcacggcgggaagtgtccctgcggatgtccggattttcctgaaaatactgcaactgcccggaatagggattgactttcaggtaggaactgaaggtctgcccgttgtttttcagcccttcgacaagcaaagtcttgccatcctggaggttcgctttttcctgtgccgtgaacacgtgcccgtaaacctccgccggaatacgcggtgcctgctgctcgttgaatccgttcggcgtgcgtgaatacatcgtcctgccggtattcatatccagcttgacgaacgaggagaattcctccccgttgcgcccgatcatgttttccagatagaccggctgtcccttgcgcagggtttccctgtcttcggcagtcagctgcacgttgcagatttcctttggaatataaatctctccggtttccggattgtgccgcgtgtagttcgggcgccccgtaaccttgtctatcgttacaaaggacgagaaggtgtcattcctgttcctgaacttcatgtcttccaccagaatggtatgtccttcgctgagcatttttatctgggtgggcgagagaggcacgcctccgatggaacgttcgttgaaaatctggtttttcggaaagatgaattccagtcccctgcgctcggcactgtactggagtgtggcatcgaattccttgcctgctttggaagtcataccctccactttgacaggctgtccctccttcagcagcctgatctcctctgcggtaagtttgaccccgctcacttcctgcgggatgtaaacgtgctcctgacggacggcaaccagctcgttggtgctcttgtcgatggaaatcagacagggggtatattcactgccgcgcaggttgagttctgccacacgccccatgttgccggtctcacgcaggtttttcttgtcctcctcgttaaagttaaacccgaaataaggacgctccaactgcggttccttgcgtatgccgtgaatggccagtcccacctgtccgtcctgttgcgggatgagtgagagccttgcatccagtttggctgtcagcaaaccggaaagatggatggtcaggggcaccagtttgttggtcttgtagcccttcagcatggaatcaaggagtccctgctgttccagcgaagcctttgagattccgaccttttccaactcctcccagttgaccatgttctcattataccggtaacgcggtccttgcgactcctgcgctgcctgttgagcctggggctgctgctgttgctgtgccgcctgctgtacttcgctctgttgcaggggttcctgcggttgtgtctctttgtctgccatagctgttttttctttttggtttacactttgttccttcttgttttctctcggacggatttcgtagcgtttgaggaactctttcaccgcatccgtctgctttccctccgacaaatccctgatggcctgcttgttcaccttgtagtcgtggtaggtcatgcggagcaggcggaaatgggtaggttccttgagctggctccaaaaattcttgatgaagttttcgagaatactcgaattcttgtcgaatttcaggaatgagttttcattcttctcgtccgccggaaccgtcttcgcttttccgtccttgtcaatttcactgacagcctgtacaccgaatttcggatcgttcttgttatgaacaagcatcaattccgtaatctgttccaccggaagagcatcacttccggccttcggtttccgggtccgtttgggcttttcgttcgggatcttttcttgtgccataccttttcttttaggggttaatgaattgctttgacgcttcaaaggtatggggtatttccaaataatatgctgattttcaaaaaggtgtcatcagatgtcatcaaatgtcgtcagatgtcataaacatgactgttcccaacggctaaaccgtgaacggagaagaagggaagtgaataaacggaaagagagaagatacgtgaggcagaagggaaaaagcctgcgcatccgacaccagaaaagagcaggcgggcaggcaagacaaaaccatgcagaacagagggagctgaagccccctgtcttctcatgccttccgcttttttacagcaagactttcataagacctgtattccggctggatatgtggaatttcatggattatgaaatacggcctcttcaagcagcccatatcctttatccatgcgtcacatcggtcgcagtttgcccctgtaatcgtttttcaaatcgaatctggattgccgccgcattctttttcgtgaaaattttccacggcgaagccgcaaggaaaatttccacgaaaagattcggcaaatgcggccggcaagacaaattcgattttcctttgatgagggggaaaactgtatcgcaaacaaacctatctggaaattccgtgcaggctcattttcttgtaaagggtcgggcggctgattcccaacaaggccgctgcctgtgtcaggttccctttagagatggaaagagccgtcttgatctgttctatgtttcttctttcatctttctgcaaacacttgtctatcttctctttccccatggggtcagaaacgggctctcccgcatattggagccgtaaggaattgggggtaatcagttttcctttgcatatcaataccgccgcatgaatgacctgcttcagttcccgtacatttcccggccaactgtatcccagcagcatcttctttgccggttcgtcaaaatccaagacctctttccggagcaatccgcaagattgctcccggaaaaaatccgccaaaggcagtatatcctccaggcaattatgcaatgcaggtacggtgatggtaaaatcctgaaagcgataaagcaggtccttccggaaacgcttttccgcaacagcctcctgcaaatcctcattggtggccgcaatgatgcgcacatccatcagcctgtcccgttgtccgcctaccggacgataccgccgttcctccatggcacgcaacagcatccgctgcgtttctatcgaaaggttctccacctcatccatgaacagggtgcctccctgcgcttcctgaaaatatcctgccttttcctctgtggctccggtaaacgcccccttgacatggccgaaaaaggcggaaggtgccagctctttggacaaactgccgcaatcgaccgttacatacggcttgccggatctgaggctctgcctgtgaatcttttttgccaggtgttcctttcccgttccggtgcttcccaatatcagtaccgtcatatccgtcggcgctaccatgtgaatgtaccggttcaactcgcaaaaaggggtgcttttgcgttcatagattaccttggtgaaagcctcgttcaccgtccttatttttttgattacgggcagcagcctggtttcaaccagcggtttgaggatataatcttccgcacccagcttcatggtatgaaccgcagaatgtatctcttcataattagtcatcatgatgaacgggtgcatatagccgttctccctcatccactgcaacagcgtggtactttccccgtcaggcaatcttaaatccgccaatacgatgtcatcctcacggacggatgtcccaatgaccttcttagcctgtgccagcctgtaagtccttacagtatccaaatccgccttctgcaaaaaattgcagatataattacagaacaagacattgtcctcaacaacaattactctcataagctttcttagcctgttgtgccaaacatattatttcttttcctttttccaatacctgctgtacagtccgcccgaactcgtccacagaaaactctcccgaatcctgaagcagtgcgaacaactcatgcagcggcttgccggcatgaatgatctcccatgagcctgtcagatgatgtatccattctttcagtgcctcatgatcattcttttctgcacattcagccatagcctccatatccttcctggtctcccgaatcagggtatccagcatcttccgcctgttcccatatttcagcagggcatcgaggtctatctgttcagactgcctttcacttcccagacattccgtacatacctgcaaaagttcttcggcggaaaacggctttttcaaacagcccgaaaaccctgccgcatacaaatcccccgtatcgcagtttcccgatgcggtactcgcgataaccggaatgctccgtgaatttcccacattggccatgcgcaggagcttcaacacctcgaatccgtttgtccggggcattttcaaatccgtaatcaaaaggtcataactacggctgcggacatgctccatcagatcacgcgtgttctcacataccgtgcaagccaccccgtgatacgcaaacatttccctgattgccgccagcaaaacggtgtcattgtccaataccagtaccgtataggaccgtacggaaatccggctcctgccgctctccgccatcgcttcctctgccacagccaaaggaagacagacagtgaaccggctgcccacccctttccggcttgccacttcaatcctgccgtccaacaatccgaccagaccttttactattgaaagtcccagtccgaccccttcttccgcaatcgcattgggaagcctctcgaatgcagtgaaaatgcgtgtctgctcctcatcgtccattccggtgccggtatcttccacgataagcgtcaatacgccctggtcaaattgtgtgcgaaccgttacacttccccgctccgtaaacttgattgcattggacaacaagttgcttcctatctgtattatcctgtccctatctcctataacaaccgcatctccggcactcagcacgttcagcaaaaggttttttcctgccgccagcggcataaaatccgtttccaaaatctcggtgacggaacataacctgaacgggacaggaacggccttttccccgccactctccaaccggaaaaatcccaacagggaattcagcatggaagacatgtgtcccgccacctgccgtatgttccggctgtattccctgcacttcgacacttctctttccgtggaaagcaattccgcatagctgctgatagaagcaagcggcgcacgcaagtcatgggttacggccagcatgattttctttcttgcctcaatcagttcctcgttttcaagaacggtctgctccaactgacggactgtgccttccagcctttttttataacggtttatacgcatcatatcccggtgtatcaccatataggaccatatcagcagcaaaaccatgaatgccgtcagaccgatgaccgtggcaaatgaccgtttcccggcttccgcaacttcttcttcctgtctcttcaagtccgcttgtaccgttccatccatattctcaatcatctgccgcaactgcacattcagccttctgttcatcccatccaagctgtccgtccgttctgccagcttccgggcatacgcctgctgtctgccaaccacgctccgattaagctcatgaagcatggaggcggcagaaggagaatccgccctgtggcgttttgcgaacaacctcttcaggaatcccccttttggggcattttcccgttcactctgtctggcaatggccggaatcttcgctgcaatttcccggtcggcttcctcctgcctgtgtacccaatatatgatttcccgcatataccgctccttggctctccacaaattacggatgctgtctgtatgtgagccggaagaggagtacctcaagctacacaacaggctgtcaatgtgccgtctccgtttctgaaatgataaaaaatcctgctcactccactccataaaggtttcacagaagaaagaaagcctgagcattttcacgtatatatcatttatctcatgctttttccggttaatcatccgtacttccatttccctagccttagtctctttccattcgcagatgccaacgtaagcaataccacttatgactacaatcttggccatatatcctaccgctattttggcaagaagcggttgcaggcgcaaagatttcaacaatttattcctactttccaattattcactttttaattcattatattctattaaaattctttgcaaaataaaccgaccagtcggtttattttgcaaagataagccttttccaagaataatgaaaaaaaacaggttccagcaagtaaagttttatcatttatcagtctaaaagacaacggaatgaactgaaagggaggaaaaggaaaggaatgcgggcttaaatttctgagaacatccccaagaaagtcttaccaatagaagtgttcaatgcctgtctgctgaacgccttggcatccttcaaacttattttatgaccataagccacattggaaagaaagtcctgttcccggacaagaagttgctgatacatttgtggaaattcgtccatatattcatgggcggaggaaacaaactgcatataacatatcaggagattgccattcagatgttcgggaaaactgtttatcacccgttctatcggatttctgtattgccttaaaaactcattccaatccttgtcagccaaagaatacatttcacaagaaatctgcgagtcggggaaaaaacgcattctgacaaccgcatcaatcagtttctttttggaaggaaagtagtgtatgacagcccctttggatttatgcacggcaacagccacatcacagaatgaggtctgcttcattccttttgtgatgaataacctgtatgcctcctctataatccgctgtttcaaattcgggtccatcctactgcctatattataaaaaaatagcacagacgcaatcaacatccaaacatggtagtggaatacctagagacgaagtgacgcacctgtgctatatattttaatatagcgcaagctgtcatattccatcttgtctctttgaaattttccacttttcgtttggaagatgatatatgatactatactatgtcgttttaacagcgcaaaaatacgttatttatcgtttatttccaaatttatacgacacttaatagcactgttccataagaaaagcgtccgctttcagggacaagcagcagtattttttcaccggatttgagtttacgggtagaacagaactcatccaaggcagccagtattgctgacgatccgatatttcccacccaggtaagattggtaaaccactctcgtttgtacaattcaaaactctcgtttttcatcgcttcaatgagattaccataaataaccattgacgaagagtgaggtattacataatccacatcgtcaggagtcatgccatgtttattcagacatgatttaatatgtctaatccataacggcatcaacttcgtccctaaaagtttaatgtcctgtttaataaccataagggactcatcgaccaattcctgactttcaaaagatttccagcttttcagttcaccgtcctccctccggacagctccggcaaacatacaggtaggggtttcattggcatatgaatccatttctatccattcaatctttaaagatacgcccttttctcccggatgattttccaataatgcacaactcgcaccatcgcttaacataaagcgcaggaagtccttttccaaagccatatatggattggtgcccaaattgcagcatctttcatattcgatatcgaagtttttggataaaagcattgctgacaccaattcagatgtgctgcatattgcattctgtttttctgatgcagctatgctcaaataagctattttcagcgcttgcagacaagacagacaaactccagcagaagagaatatttcaacaggttcttcccaaagcccatgtaccatagacgcatgagaaggcagaatctgatcaggggtcgcagtagcacaagcaagcaactcaatgtccttttggctcttattggtcaatgccagcaacttacgtatagccagcatcgccatttctgcatttgtatgtgtgatttcttgatttttgtttaaggcatagtatcgccgtttaattccattttgctttaaaactatccgttgcactttggaatgttttccagaaatgagtcccaagaactcttccatttcatcattggaaacaggagagttcggaaagaagcttgcaagcccagtaataaaaacatctttcttcattagttcaatttttaattagttcatattgattataaagaactactttcagttcttctattcgcaatccattcaccaatgcatcctgaaaacattttccaaacagcaggattcgaaatgtcaaagccaatgtagaaggattaacatcggatcttatttcttttgtttcaacagccttcacaaatattctttcccataatttaatctccttatttgttatttcgttgaaagcctcgttaaatcccggatagaaatattctgcctgcaaaatcaagttaagatatgcacgtgtaatattggtcttctctttttctatgagatagatcctcattgcattcatcgtttcctccaccttctttatgtaataatcaataaattcaagcagagaggtgtgagaaatgtccttgaacttatttttggcatcttgtttgtgaaaaatgtaaaaatcaatcacatcaataaacagttcttgcttgcttggataatgatatgacatacatcctcttgataaattcagacttttttctatctccttcaggggaaccgtgttgtaatcttttgtcagaaactgtttgtatgcagcttccctgattaatctttttgtttctgagccttttactcctttcataaccttgttttttagtatcatacaaaagtaggtcttttgagtgaaaacacgttcatttttagtataattaaatatgtcctacccaattaccattaaatcatttatgaccatacataccagtttatgaaataaatgccaacgatgcctttttcttttttttcttatacatatattattttttgcttatatttgtcttcaaataagccgattagtcggtttgttcggcatagaggaacccaaacagaaagtggaatttcaaaacagagatgttcctctatgtctttgttattccatcttctggcaaccggattctatccctgttccaccatatccctaaaaaataccgaccggatggtattttttacggcaaaagtataaatatataccataaaaacaaagggaaaggccaattatgcattctatcggcaaagaaatgcctatgaaatatacataatccgcttttccctatgagaaacattatgttaccggcttatcttgaaggcatcttcatcttaacctgcaccccctgtgagtttaaaacacgaaccggtgtcttttctccggctttcaaatagaacagaatataatccttcgcacgctgggactcgaagaaacctttttcgcgatattcggcaatccacctctgaatcatcggaatctgccaacggttcatcaaaatatagtagccgaaataatactccaaatcgctcaggaaaatattgagtttcaagtaatcccaccagaactgttctttctttttgcttttggcattgagtatgataacctgatgttcataagtgtcacgaggattttcccaatcctgttgcgaaacaaatacatcgggaaccacattatcggcatgatcctttgccggaataaagggaaataaggattctattgaatcctttatctttccatataaggacggttcgtactccttgttgtacagcataacatcccgcaaacgggtggaagtgagatgggttaccacggaacgtcctaccacacaatgatccggaacagtcattaccgatgccagacgtttcataaatctgacttctgcttttgcctgttcttccttatccggtctcttgaaaggataatctgaccaggcaatcttccgcatcccccaatgcaggtctgtaagttgcaaccccgcataagcacagaaaatggaagcacgaattatcttgaagataggggtacggtcaccctcgtgggccacgtaaggcaggtcttccacgccaaaaagcatttcattttccgctatcaaatcggcagagaccgtcttgccttcttccaagcgtcccttaatcttgaagttacgcttttggtatccccaagtgtgaacaggtcgcgtagctatcagtgccacacaataattgccgttttgcggcatgaaatctacattttgcggtgttgcattgagcatcaactcgttcagcaacttaatcttttggatatagtccataaatcaacaggttttaagtgaaacattttgttaacagtgcaaatgtaggcatcaagtttcgtaccggagttccgtttttcgccgaaaatcactgcagggtcaaccaattattcaatatttattctgttctcgattctcagtatatagtttgtttccgagaaaaagcgttccatacgtactgcctgaccggttctgaacaaaggtttttcactattggctatgtaggctttttttatgggaaaattccgtgcctcttcctgttgttcaaaataaccaatggtagaacgcaactgctgttcgccgtcttttatccattgattacccttgccttttctttgtttcaactctacaaatataatcgtatctctataaaacaggcagccgtcgcagcggttgtccatactcccgtccgccctgcgcagttcaatgcaatggtcaaccggtacgaaattcacctttacctgaggataattgtccactgccgcaatccaatcctgcccctgtctttctgcaatatatgctttttcagcggcaggagccggccggtcgcatataccgaatttgcgtctgtttgatgatgatatatgttgtgtcgggaagaagtcaatcataattcctgttgtatttccaataaatcggcaaaatcttcgtttgttctctccagcatcctgttgaggaagttctcatcggaaggaagcccatgatatgtgtccagtactgttactgtcccttcgacctcgttgaactcgtaaatagcgatttcgtcagggtgtatggcagcttctatgggataaatagcatttatcctttcttgtacctcacaggaaagattacctacagccaacagcataccggctttgacagcgacggtcaggctattaataaggtatgggctatgtgttgtaactaccaaacggtttgtttccaaagcattgttaaaagccagcaactgtttcattatcatccattgcgattccggataaaggttttgttccggttcttctacaatgttgacaaatgccgatttgttgaatctggcagaaacggctgaaagggcaatcctccgttgctcgtccgtaaggttcggtatgttccatatattcgcaacttccgcttcgaagcgtttcgcttcatcgctgctcatcttctgggcactattcgcctgactttttacagattcggacaaatgtaaagaaaccaaataaagcggtacgatggattggaatccgctggacgcttccatcaacttcaccttatagtcctcacctttgacataaacaatgtcattttgtttgttatattccagttgcgcatgattgataggcagttccagactactcttaatgcgttgtttggctttgtcatattccgtaagaaaacctagcaaggcatccggcaaatccttaatcagattcggtttgttgaccatgctgatgaaattccgttcggcaggaacgtacatgatttgaggaagggcatagctgtccaatgcattctcattcttttctatgacaagttcgccttgcttcgtgtaggtaaacttgtaggaatccccttcgtagaaaatctcagtctgttcctttatgaaataattggaaatacgatggtaaccgcaatacttgttcttgaacttggcggcggtaaattctttctccttgaaatcaccccgtgtcaagaccttctccatccatgtaaaggtggaaaccagtttggcaaccgtacttttaccgctaccctggttacccgtaaaaacggttactttctttatatctatccatccgtccgttacagatgctgtttctttcaacggaccgaagtttttaatcttgattctactcatatatttattgtatagacctgttacaaagatagtgtttctaaatgaaacgacctaatgaatgttgtgtttcatttgcagtgaacatagaggtcttcccaattctttgtttttccaatttttaacctgtatgttttatgatggttttctaatagtcagaagtgtcattctgatatccgaatgtgtatcagtcggcattgaacggacggatttcggaaagattttcattgccgctgtcaataaagcggtcgagcaccttaatcatgacaacaggtatattctgcttccatagtatctgtgcgtccagctctgtacaaaccaatgccatctgtttcaattctttttccaagtatgctcccgaactgatatattcattcagaagaggtttgttttcggataatttgattacagaggcatataacttgtattgttcattgatacatttcaaatgaaacttgtcctttagtgtggaaggcggatcaagtaatttcagtttgggcaggtctgacttgttgagaataatcacagtatttgtaaattcgactgtatgatctccaggcagactatacaacaatctgttgtcaggggatttgaacttatactcgttttcctttcgtaaattctgaggataagcattgtaccagttgaagtggaatccgatgattatctgtttgtcggtcaatcttaaagtctggaaggccttgtcaagattctccggaaaaaccctatattcacttttaggctgatactggaagcttcggagccagcagtttttgaaagagtatagtgtagcagcactgaaagactccttaaaattgacatatcctattgttttatccgtacagaatgcctctgccggcatcagctgacgtattcttccgacacaattgaacttgttacagcttttgtactcatcatcagttatgacagaaacttctgtaatccacttcatttctctgccaatactatctgatgctatttggtaaaaatcctgaatttcatcttcagacagctgttgagtaactttttgatgttgtattgttgaagtaagcgaattggaaagggactccagtgcattcttcagcttatgtttagccctgtatatgcacgactgatccaatggcagtattgttgtgatgtcttccagtggaatggaattctgctcaatctgtttcaggataatcggaacattttccagccattcgttcttttcggataaggattcaggaagagccggcagtgaataaaaatcctcgtaaacataggtgcggttaagtgttgccagacgtaacattaggatatacaagtatttctgtatccagccattgatgatgctattgttgcgtacgccagcctgaagaccaaaaaatggatatttttgctcgtatttgtacattgaatcgggactgaatgagagcaagtccatatacagtggaataatttcagccagtgaacttggaatcagtacataatgagggggttggctattagtgtaatacaatatttgatttaaaagttcatattcttttctatataacaaaagtccacctaatgcgatatgaaactccttaaattctttccgttctttctgcctaagctctaccatttggctgtttgcaacagtttgtccagatgaagtgtagggaacgtttatacgttcatcaagttggaaagatgtaagatgaagaaacaagtgtgaatgggctgcaccccaatatttaagaatccattcgctgcgcttgtaaaacaattgctggttcaaacaagtccaaatcgtacggtaggtattctgatgcattatggtgaactgaaaatcatccagcattgcattgactatatcatttccgttcttgatggaaaccgcttccttttgttgcatgcacagctgctcattaatggagacaatgccttcgtataactccggcggatattccattaacgtccattgtttacctgcacgtaaagatatgatccagtcatacaattcctgatagcaatcgcgcaatacatccacattgttctgtttgagcatggcaataaaaagttcgaaccacgcttttctggtatcttgtgggatattgtttctttttatcaaatgcttttgcagcttttcaggtacattatagatatagataagcctgaaaatcataaatatactgaatgttagcagtacacagaatattgtcgcgagaataatggcagaataatctatgtactttgtaagaactccgaaatcaaaatagttaggtggagcgaccaattgatagaacagtaaaaatatggtaatagcgagcaagccaagaaaatgctttgtgcttctttcgttcataaagagttgtatcaggcgggtagattcatacttatcgtctatccgctgaataactccaattaacaagggaacggcaatgcccagtatggctgccgttataggtataataatttctttagaaaaaatgtccataatataaaaaatgttcaatagttgctatggtactggaggaaactttatgcgtccttctttatcgatggtacaagataaggcttccccttgaatttttttagctatacggttataatttgttgctgttcgtgtttttaaatctaccatttctttccaatcaaaggtatgctctatattaaaaacattctgttcatttgctgaagtaaatcgcatggatgattttacatggatattaccctcttgagaccggacattccagttaaatctgggatgatattgtaattttgcagcgaggcataatctttcgactgttgcctgaattatacctatagtcgtgtttaaatctttcagactttgggagtaataccatttgaattcatcatagatttggtaatccaagggattctcaaaaggttggaacaactggtaaattttgctcaaaaatgatgaatcatagtcatgtaaaaatgccggaacctcctgatccattaaaacacggcagcctttggccccagcctgttccaatttgacagccttacttacagcatttcctagcaacatttgtcccaaattagtgttgttatcttcaatgatatctccgtatgcaataccaccacgacatagaataccattttgcaaacaatcccacataatagtatgacatgaaagtatgacatctttcatgttttcagaccagacgaaagcgcaatcggacaactgggtgaaatttactgtagggtatttactctggcagtttgccaagattttccgaaaaatgatcaaaatattggctgcaaattcctgattccctgaagtctgaaaatgtttagagacctgccaaatattaaaatcgtcttctgtaagctggattttaccttgtgttaaagctgaaaatcctagtatatccacatagaagacaaaaccttttagattattcatgttcataatgttatcgtttataactggttgaattttttttggacattttgagctatactgatgaaacagttgggaattgtaacatattagttgttgcttgtcacaaagatagtatatctaagtgagatgagttaatgggggctttgttttatttttgattttgccaataaatggtatttcctaaaataattttgtatagttcttcatttttattgtaaaacaagttatattcttctttatgtttccatcttgaggctgttttgatgactttaatgagtttattattatcataaaagtattctatagttgaactatcaccataaatattaactccaacatatattgaattctcattatttactatttcaaattttgatatagatattaaattaattacgggtgtattttcattttctgttgggtaatatttgaaataggttttgttatatccatgtttagaatattcatataaactgatatataaaccttttcgtatatctgcatctatatgttgctctgaaataatcattttgttattttcatcgaagccaaatctgaacaagtcctgataattccatttttcaatggtcatgttttttaaaagtctaccttttttttctttattaagtaaatgataataaggtagtagattataatattccttggtcgaatattcccatctatgtacattttttaaatattcttttataagaagaatattattctttttttgtaaacttgttatttttaattttaaatctgttaacataattgtcgatatttaatataaattacttatgaattaatgggttgaattgttccatcttccactttctatttctgttccaattttttgtaattgttttctgacataattgtcttttaaattatcgcttaatttattgtctatcgcatatttctcagcactctctaataattcacatattcgtttatcactttcaagcgaatgtatgtaccctgcatggtaagtaccagtagttctggcagcttctcttcctggatgtccagattgagttacttgagaattagcagtaccccatagagcaactccattttcggcatcattaattcctatgtgacacctttccaatacggctttggatctgtttacatattcattattccgattcaattgaacaatatgatgtggagtctgtccagcagcaacaggcctataggcattttccatagctttttttaatttataagcatgagataagcctaaaatatcaagtgctatgttagtagaattaacatatctatatattgctaaaataccagattttaatcctataggatcttgactcatgtaactaccaattcttggttcataatacctaaaacggttgtagtataatcccgattcctcatccacatattgcccttgaaacctgaatggacaatcaaactccattcctttatttacagtaatcacttttccataaatatctagtgtacaatcccaagttttgtttcctttttcatcgtacatctgaataggtgtacccaaataatcggacacaatagaatattgcttaccatcctgtatctttgctgttggtacaaacgtgcctgcttcgaacacccaggtggtaacatcttctgccggttcttttggaaggatgttttcctcttcgtccgattgtaagccaacggctttatagctccattcgtgtaaaggtacgtttccgtcccacacccagcgtgtgacctttccgaaatactgtttggcggtgcgtcttcccaacgcatcgtaacggaactccaccggtcttccgtccggacgtataaccttctttagcataccattggaactccactcgtagagccatcccgtacctgtagccagacagcggacgccgcgctccttctccatgcgcttgcggtcataccttacgcccgtttcctgcaaccgtttgaactcacggaaaatgaggtttccttcgtcgtcgtagtgatagaaacaatccgggtcttccaacagttttcccccgggaccgtatttgcggtcttttttgtccggtgtctcaaagaggttgcccacgaagtccggtacgcggtaaatcacgtccgtttccgagccctggatggtttcctgccggataaggaagtcgaaacggtcgtagtcgtagcgcatgaccgttcccgtcagctcgttctccttggcgagcaaccgattagcgacgccccactcgtagcggtacgccccgcgctcgatgccgcccgcgcggacggacttgcgcacctcgcgcccgaaacagtcgcgctcggtgctgacggttacgccaccggagaaggtgcgctgcacctccagccccgtattgtcacgcacccacgatgcctgccagctctcgcctgcctgcatggtctgcaggttgccttcccggtcataagtgtgacgaatgtccgctcccagactgctggtgatgcgggtgcagttgccttcgctgtcataggtacggctgacggtgtattctccctgcctttcctctgtaaccagtcccgtcttcctgtcacgggtgaattccagcaggttctcgctgtgtttcgccctgacgagcatgccgtccttgtcatacgtgtagagggagacctccccgtcatactgttcctccttcaggatattgtccagtccgtcgtactggtattccgtccattttcctccgggacggttcacacgggtgacacgacccgcgccgtcgcgctcgtactcacgccgcagaccgtcgaagccggtttccgtaacgacctgtcccagcccgtccagctcgaagaaatagttgtcgcccacctcattgccgatgcgccggagctgcaactcgctgttgtagccgaatgtaatccagtgcctgtcctgctcgcggcttttcaacacccccagcgccccataggtgaacctgacctcgcggatgttgtcgctggcatgtaccatgtttcccatggcatcgtactcaaaccggtgcacgttgccgtccggttcttccagccgtatcaggttgtccgcccgattgtaggcataacgggtaacattgcctttcacatccaccgcctgcacaagccttcccctgccgtcgtactcccaccggcggaacagcccgttggggaactgcagcagctccaggtcgtacctgtcgttgaacgtgagcgtgtaaacccggccctgtccgtccgttatggtacgcaacacgcctccctcgtagacatatttcacagtttctccacccggtgtggtccggctgacgacccgatcctgtccgtcatagtcccatgaaagcctctttccgcacggagtgtagagcgagaccaggttgcggttgttgtcatagtccaggaaggtgtcctccccgttctcgtccgttatccggaccggcagtccgaactcgttgtaggaagtcttgcgggtatagccttcggggttgaccgttacctccagctcctgaaagctgttgtactggcggcgggtaattcccccgttggcatccactatcttgtagatgagtttgtcctcaccgtaataatattcggtttcggcattttccccattgcggatatgggtatatcccttaccgtaacggatgaaatattccatcacgcctccatcgccccatgtatgcacacagcgggcattctcacccttaccctcgtattcccaatggaaggacatacccccttggttggtaagctgtaccagcaggtgcccgccggaatagacgaaatgcttgctgacatccagcgcgtcaatggtttccaccatgtcgccccggtcatcgtaacggtagcggaccagcttcacctcctcaccgtcctgatttacggaaacgcagagcacccgccccgactcgtcggtttccactttcaggaattctccccgtgaggatatgattcctgccagccttccccccgaagcgtattcgaagcggagccggaatccgtccttcgtggaaatgcccgataccatgcggtaaccggagcggttttcgggaccgtcaaaacggtattgcaacccccggatgtccgtaagcatgtaaccccggccatcgagtgtccatgccagctgttccctgcggtcaaaatgggattctccaagtttcagcgcaggcaggaaggactcccgtccgtcagcatgacggaatgcgaacgccccttcctccaactgccgtattcccagattgtagctgtggtgccaattgtatcccaacggaccgtccacggcggcatcactgtaataggtacgttcccatacgacgggaatcggacccggaagctcgaagtccacattggtgtgatagaccctgcccgtagcagcgtccaccggctcaccgaatatgatgcaagctgttttcttgagaatcctggcaagccggggattcaatcccgccttgtctatcaatccatgcagcagatgggatatttttttcccgagctttgacaatcctttcagccccagcttcatcgccagcgcaaacacatcaatggtaggcggtcctcccacaagcacgggatttcctacggatgtgatggtggagagcatggaagtgggggcaagcagggccttgctcaccttcctgggcttccccttgcggggaatcgtcggtattcccacaatgttgcatgagagtgccggatgtgtgagggaggaacagggcgcaccgtccgccaggacagtggaactgcccatccacatctcggactcggacataccgctgaccaacggggccggatgcaatacaaatgccggcagatgcacgatgccgatacctgcctgcgcaatccactggttatgcaccttgaccgacggagccatgctcttgaggatgttgcacgccactccggccactccatcagccgcaggcggcatggcagccgccatgccggccatgaggtctgccatgaggtcgtacaccttgcctacatgaggcacaggcatgatgggagagggaggggtaacggtaggatgcatgtctatcccgatggacaggtcgccgaacttggcgacaggcatacccggcatggaaggaaggattccgcccagacccgcctgaatctcgtccaaagccgccttggaggctgaaaaaaggtcggcaaagccccgtctgacgctgctgctaccggcggcgtcagctatattcttgaacacatccggcataatgaaactttttgattcttgtttttaaaccgattggtcggtctgctttttgcaaatgtatcatttaaaatcaaaaaagaaaaacattctcctactattttctatcaaaaatcataagacaatccataaaaggcaattgatttcaagtcatgtatcaaaaaaacgtcgtatatttgcatctgttgaagaaaaaaggagagtaaatggactttgaaggagaatataccatacggacggcttccaaccagcagacatacgagccgaataccgtatatccggacgcagtgctaaatatagcccgcgaatcggcttccgtgttccaactgaagcggaaatgggaaaaaactcctccgatgctgaatctgacccctgattttcaacggggactggtatggaagaccaaacagaaaagcgagctgatagaatccatactgatgggtattcctctacctctgatttatgtgaaggaagatgagaagggagtgtatcttattgtagacggcaagcagcgtctgagcaccttgttcagttttatcaacaatgaatttgccttggacaaactcactatcctaaaggacaagaacggttcccgattcgcagatttgactccgttggagcagaataaaatagaggactgttcgcttaccttgcatgtgattaaggcacctaccagtgaccgggttacctttgacttgtttgaccgggtgaaccgtggcgggacgcggcttaacaatcaagagatgcgcaatgcgctctatcagggcaatgccacgaaactgatcaaccggctggccaagaaagaggtattcgttgaagctacagaaggttccattccagacaaccatatgaaagacaggtatctggtactccgttttacggctttttatttgtggcagcagcatatcaccatagacccggacacccatgagcctctggattaccgaagcaatgtagaggattttttggggaaaacgatgcgttttctcaatcagctggagccggaaaacggtttgtttaaagaactggatagccggtttacacgtgccatggagcttgccatacaactgcttccgtcaggcggcttcaggctgccttcgttacccggcaagaaacggccgataaacatggctttctttgagagtttcagttatcttctgtcaagattgaacggagaaggggaacaattccatcgtcaggttcaggatacttatatgcaattaatgtgcaatgatgcctatctggattctctcacacgctccgtggatagcggaaagcagacctataagcgttatgaaattatcaaccgacttattcatgaactgaatttatgctaaacaatctgactgtcaacaattataaatgcctggtggaatgttcgttggaattaaaacctctgaacctgttcgcaggtccgaattcatcgggaaaatctaccgccctgcaagccttgctgattgcttcggataacgtgacggagcaaaaaggcaaacacggtctgaagaaccggagaacagaagcgtcgaatttcaatgatgtaaggaactttgtgaccaatgccaagtcatacgaaatctgtatttcgtatcatggagaagatccgacccggctttgttttactccgggcgatgactcattccaaaccacttttgtggaacaatcggctgacgcatctccgaacctgctgggagttctcggaagcgagaacctgctgtacctgcctgccacacgccccggtggggcatatatgcatcccgttaatcccgattcggaaaacaagctggggcgtaacggggaatttgtgatagactattacgccaagcaccgtctggatacgctggatgccgcattgatcctggctcccggcactcaaaccctggaaggtcaggtgaattatcaactggacaggctgaccggttaccggctggtggtggaaacagtaggaagcaatcattacgtaaaatatgaaacgcgcagcggcaaacagcttctcccttaccatgtcggtaccggagtaagctttatgacggaagtcatcatagcttgtttcgcgaccccgaaaggcggcatggtgattacggagaatccagaaatccatctgcaccccaaggcacaagccgacctgattgatttcatggcaaagatagcgaaagccggtgtgcaaatcatcatagagagccatagcgaccacctgtttaacggtatccggcgcctgatcagtcaggaaaagttggccttgtctgacgttgccgtgtacaacttcagacaagacgggaatggattgacccatgccgaacctgtggaatttaccccacagggaggaatccaatcctatattcccggcatgtttgagcagtttgatattgatttggatgccattttaaagctataagactctatggacggtatcattatcaatgaattgtcattgaacggacagtttttggacagccgggatttctggaaaaacggaatgcctccgtttcacaaggcattgcaggatgccctttcacatggagtgggatatctgttcaaacaaggaagtttttttgctgcgcaagccactcccgacaagactttacacgatttgctgacagcaccggaaacccgtatcatcgatgaagccaggctgtataaaagtacattggcacgtgccatctgtaatccgttttgggatgaagctccccaacaggattccaatgcccaatattcagtaggtgaaaccgatgtatccggcagttcagttgccgaagcagcagcccgctcggtttgtcttctatcatttattagatccaggtatgagaagcatctggttgccgtaaccaaagatgaagaaccaatcgaggttggtaatatctggaaagagaagcaattgtactctatcttgtttgaaaggggtgaactatctctcgaaaagtatattaccattcgtttcagtggaggcaagcttgatttcagccttattgatgacacgctgggtttttcccttattgacggcgagaatcagaacgaatttattgattcattccataaatttgaggagttggactggagtgccattgctacagataatggattggattataaaccgtataacaagaacaagaaaagcaagcgctatttttcggatgacctatggaagaaaggcattaaaaagttcagaatcactcagcggaacaggtgtttcggctatgtggagaatggtgttttttatgtgttgaggtttgatttggaccatgagctaagcgatgttggataatgtttatagccccttggccttatttttataaaaatagaaagctgtgcaaatttataagattggcatcttgcttatctccatatactttcagtcggaaattcaagaattacaaatcctaatacttataaccggcggatttataatccgccgggacgggtcttgtaacttaacaataaaggtagtgttccaataattaatatgtaatacatttgttttgatactacctgctattgtactaaaaaattaagaatactcccaatatgcaacaaaaagattttcaatattttcattttctattttaccatatacatatatacttccactcataaattctgagatgcctctcattccaatttcgttgatttgaaaaatgaaatcatatccatcttttgttacttttccatcattatccaatccccattgtattggtatagcttttcctccaaatttgataacattatttttttctggcccatctctgtcttctcctatttcatataaggaataaatatcatcaatttcgggatgtttaaatttagtacaattactctgttcgcttatttcatgttcaattagtaatactttgcaattaggatatgaattgtattctaaggaagtatcaaaatctggagtaaaaatagagtattgtctttctttatttaatgggctttgcagggttaagtagaaataatatttttccatattagggaaagaaatattatctaatattttaggagcattacccccaacccaactattacagttttctttatattcacatatatcataatataaagcgtcttctctagtctttaatatcttttttatgttcataactattttatgatttacatgttattaaattatttgctttagcatgtgctattgcatcctgtctgagtttctcgactaatgcggttgctttttctttcgcagtttttctatccatgccatcagctattaacccttccattattcctctacgtgttaaagctgcatttttgtttatattttctagtgcagattgtcctttcaagtttttacctttcatcccatatctattttgaagagcggtaattctattgtgtatacccttttctcttaatgcaatagaagggttttctttagaaattaaatcaactcctctatttttacttgtgggaagtttattgttctgttcaagccatgcgtgttgaaggagttcgtgtgctgttaaattgtcaccaatattcgccctactgctaatattgccataagtatcgatgtcaaattctttggctacaagtccaaaaatatcaatacaaagattgacatttttgacatagctataaaatctttcacctgcacttagtccaatagggtcttgacttatataattaccaatttctggttcgtagtacctaaagcggttgtagcataatttagtttctttatccacatactgcccttgatagcggaaaggacaatcaaattctgttcccttatcaatggcaagcacttttccatagatatccagtgtacagtcccatgtcttgtttccttgttcgtcgtacatttggatgggggtacccaagtagtcggacacaatggaatattgtttaccttcttgtatcttagctgtaggaacaaaagttccttcttcaaatacccaagtggtaatgttttcaatcggctctttctgaaaggattctcctttttcatctggttgtatttctgtagttttgtatctccattcatgtataggcacgtttccatcccatatccaacgtgtgaccttcccgaagtattgctttgccgtgcggcgccccaacgcatcataccggaattccaccggccttccgtccggacgtatgaccttcttcagcatgccgttggaagcccattcgtaaagccatcccgttcccgttgccagaaaatggataccccgttccttctccatacgtttgcggtcgaaccttacacccgtttcctgcaaatgcttgaactctctgaaaatgaggttcccctcatcatcgtagtgatagaaacaatccgggtcttccaaaagttttcccccggcaccgtatttgcggtctttcttatccggtgtctcaaagaggttacccacgaagtccggcacacggtaaatcacatccgtttccgaaccttgggtggtttcctgccggataaggaagtcgaaacggtcatagtcgtagcgaatgaccgttcccgtcagctcgttttccttggagagcaggcggttggcgattccccattggtagcggtaagcccctttctctatgccgcctgaccgtaccgacttgcgtatctccctgccgaaacagtcgcgttccgtcttgacagtcacaccgccggagaaacttcgctgcacctccagcccggtattgtcacgtacccaggatgcctgccagctttcacctgcctgcatggtctgcaggttgccttcccggtcataggtatggcggatgtccgctcccagactgctggtgatgcgggtgcagttgccttcgctgtcataggtgcggctgacagtgtattctccctgcctttcctctgtaaccagtcccgtcttcctgtcacgggtgaactccagcaggttctcgctgttcttcgccttgacgagcatgccgtccttgtcatacgtgtagagggagacttccccgtcatactgttcctccttcaggatattgtccagtccatcatactggtattccgtccattttcctccgggacggttcacacgggtgacacgacccgccccgtcgcgctcgtactcacgccgcagaccgtcgaagccggtttccgcaacgacctgtcccagcccgtccagctcgaagaaatagttgtcgcccgcctcgttgccgatgcgccggagctgcaactcgctgttgtagccgaaggtgatgtggtgccgttcctgctcgcggcttttcagtacccccagtgccccataggtgaacctgacctcgcggatgttgtcgctggcatgtaccatgttccccatggcatcgtactcaaaccggtgcacgttgccgtccggctcttccagccgtatcaggttgtccgcacggtcgtaggcataacgggtaacattgcctttcacatccaccgcctgtacaagccttcccctgccgtcgtactcccaccggcggaacagtccgttggggaactgcatcagttccagatcgtacctgtcgttgaacgtgagcgtgtaaacccgtccctgcccgtccgttatggtgcgcagcacgcctccctcgtaggcatatttcacagtctctccgcccggtgtggtccggctgacgacccgatcctgtccgtcatagtcccatgaaagcctttttccacccggagtgtagagcgagacgaggttgcgattgccgtcgtagtccaggaaggtgtcctccccgttctcgtccgtaatccggaccggctggccgaactcgttgtaggcagtcttacgggtatagccttcgggattgaccgtgacctccaactcctgaaagctgttgtattggtgacgggtaattcctccgttggcatccactatcttgtagatgagtttgtcctcaccgtaataatattcggtttcggcattttccccgttacgaatatgggtatatcccttgccgtaacggatgaaatattccatcacgcctccatcgccccatgtatgcacacagcgggcattctcacccttaccctcgtattcccaatggaaggacatacccccttggttggtaagctgtaccagcaggtgtccgccggaatagacgaaatgtttgctgacatccagcgcgtcaatggtttccaccatgtcgccccggtcatcgtaacggtagcggaccagcttcacctcctcaccgtcctgatttacggaaacgcagagcacccgccccgactcgtcggtttccactttcaggaattctccccgtgaggatatgattcctgccagccttccccccgaagcgtattcgaagcggagccggaatccgtccttcgtggaaatgcccgataccatgcggtaaccggagcggttttcaggaccgtcaaaacggtattgcaacccccggatgtccgtaagcaggtaaccccggccatcgagtgtccaagacaactgttccttgcggtcaaaataggaatctccgggtttcagtacgggcaggaaagactcccgtccgtcagcatggcggaatgcgaacgccccttcctccagctgccgtattcccagattgtagctgtggtgccagttgtatcccaacggaccgtccacggcggcatcactgtaataggtacgttcccatacgacgggaatcggccccggaagctcaaagtccacattggtgtgatagaccctgcccgtagcagcgtccaccggctcgccgaaagtcttgcacttgatgggctggagaatgtccgccagcctgttcatgccttttttcctcagcctgtcgattaggttttggaagcggtcgcctatcttcttccacatcttgcccaagcctttcagtccgaacttcatcgccagcgcaaatacatcaatggtaggcggtcctcccacaagcacgggatttcctacggatgtgatggtggagagcatggaagtgggggcaagcagggccttgctcaccttcctgggcttccccttgcggggaatcgtcggtattcccacaatgttgcatgagagtgccggatgtgtgagggaggaacagggcgcaccgtccgccaggacagtggaactgcccatccacatctcggactcggacataccgctgaccaacggggccggatgcaatacaaatgccggcagatgcacgatgccgatacctgcctgcgcaatccactggttatgcaccttgaccgacggagccatgctcttgaggatgttgcacgccactccggccactccatcagccgcaggcggcatggcagccgccatgccggccatgaggtctgccatgaggtcgtacaccttgcctacatgaggcacaggcatgatgggagagggaggggtaacggtaggatgcatgtctatcccgatggacaggtcgccgaacttggcgacaggcatacccggcatggaaggaaggattccgcccagacccgcctgaatctcgtccaaagccgccttggaggctgaaaaaaggtcggcaaagccccgtctgacgctgctgctaccggcggcgtcagctatattcttgaacacatctgacatggtgagaattttttagaatgtgaaaaagagacaaccgggtgttccaaccggcacactccggctgtccctgtaaggacttacctatgcatcctgtgcatagtcgctgttccagtcgttctcgtcatccccttttgtaccttccaacttgatgacaaaactctttgccgggaaataaggagtcaggtgaatgtcgaggaaaatacggtctttctgcttcggatcgcgctcgaaacgaagaatcttgaatttctcaatcaagcgtccgggaccctgtatgctatccaaaaacttgctgatctgaccacgcaaatccctttccgccttgctgttccagttctcaaaggcacggcggttgaggaaatccatcagcactttcgttacccaatcgaacacacggactacggaataggtctgcaatcccaagttgtccccgttgaacaatgtcttggcagagaaagccatcaccttgccgtattccttcaccatcggaatcaggccaatcttctcgatttcggaaatctcgctttttttcaggttgaaagcaaccccgtccacctcgctcatggaaccatacttcttaccggcggtaacctgtgccattaccgtcttgtacacactgccggccaatgccgcagaaggaggaatcagcaagtcttcggtttcgcccagttccgcatagcgtccccgtcctaccagatagttgcaggtcatacatacgttggacttgtacacatcgcctcccgaaagattggaatcaaagaacatttcaatgacatcatccggtttttccagatcagcgaaatccgtgtaaatcatcaccttgttgtcatgcgcaatctttgcccatttttcaacaaccttgttggaacccaaatatcccgggataaccagcagggaatagttggtacgcaagtccaaacggtcataattcgcacgaagctcgttagcaatggcatcgataaagaaggagttgtccaaatcggtaagctggctcatcgaagcgttcacaatggagatattcttgatcttgtcggaatccgtattcttgtagaagagcatgaccgtgcggtaggacttctccaactgcctgacctcttccaccgctttcagctggttctgggatagcagaccggacaccgccgcagacttcttctggcacagttccaccatctcgctgatggatttgttgcctttcaacatatcgacccacatctcaagccgtttttccagttccttgcgctcagccgcccgttcggggtcggaaaggaatatgttccgccgtgccttgcgctccggattcatgttctgtatgccgtccacggaagattccaagacattgaaaccgccaaacttagccagaatctgcaattcagcgttcagatttctggactgcgccacagcctgttgctgctgtacggctgcttctctttgtgtattctgttcgctcataactatcattcattagtggggttagacttctcattgttcttcaaatcgtccaaaatggcagaaatcgcattgacaaacgctccacgtgtctccggattttccagcacccgttgcagcaccttgttggaacgcaacgacttctccatcctgtccgcaaactgcttttccgcattcaggccggacaagaatgaactctgttccgtcattttcctgacagaaaaatcaccgacattgtggaaacggaaattttcctctacgggagcaccgtccgcatccgcgaactcgatatctatttccggccggaaatgtgcaaagacttcgtcaatgttggtcagaccggcaaccacttcgggagccaccggctcatccttcgtcagctgttccaccaataaggttcgattttgtggaatttccgcaataccttcggaagcgtcaatcttcacttcgtttccgccgattccataattaccaagatccatacttattcaattttaaatttaaaatatatattaattaaatctcgctcaactgaaaaaacttccccttcttctggccttcgcctgctgcatatccggattgtccaccagttccttccaatcctccccaatccattcgcagagctgccgttccaatatcccgacatcaatcggagcacgaaccagccttcctgtatgaagagccagatacgccgcataaacgaacgtggaactccgcctgatttcggcagaaaggtagctgcctcctgccagggcaagcaaaaaatattcgaaagcctgttccatctttccatcctcatagcgcaggaaaccacacatgcgatagccttccatgacataataagggtccttttgcatgacggcttttttagccatcatgtcatacaaggcaaccgcttcctcccgttttttcccggctgtcagaatggccgctttcatggaaacagccattttccaataactatatcctgccgtttcaccgccctgcatcgccttttccgcctcccggacggtttcgtcgctgtatttcatgctatgcttatattccctgatagcataacatgcctcggatgcgataagcagagcggaaatccggatattcgtatcctttatttcctgtgcaatatccaacagttttcggatttctctgtccaataatttccaatcctgcttttgtgtagaatccatgacaaccgtaacctgctgcttgaaccgattttcaggtgcaatcaggtcgttaccgctatccgaccgtgccatccggttatgcaaagccgccgccatatcgaactgcgggcgtatgcaaaccacttcccgagactcacccagccggatactcctgttctttttcaagtcaatggttgtcatccggattccctgcgggacaccttctttcagcacattgccgaaccatcctgtccgggaataccccctttcctgttccggaggaaagtacagacagaaaaaggcatcatccaaccgggagatacatgccttgaaacgcaacatctctctccacaagttgcccgccgtatgctcaaccgacacatcaggaatgtattcttccttcagcagcccgtcgtgcctcagagccctgagaatatcatacttctcctcaaccttttctgaaaaccaacccgcatattcctgccagagctgttcagtgtattcctcgtcatcccccctgtacggcgtatcaaaacgaaagaatatgtcatcgaactgccctaccggagaacgttctatttccagaaacctgtccaccaagtccacatcattctgcccgacaatccatacagacagtttccagtccctgttgccgactatgtccgcccagtaatcgactgctttgtaatattcctgtatcacagatgcagatgctcccatagccaaccgaattatgagttaaactttactattcctcccgaaaccgttacgtttccctttccctctatcatcagatttacaccgttgaccgttccgttctttgcagcaacatcgtaatcctttgccgcctcctgtttgatattggtaccgctgctgctaattatactcttttcgctgctgagcaccatacattcgttgccggacagcaatgttacacttttcctgccttcgagagcaatggtatcggcctgcaagcctatcgacttatcatccattacgatgaccgattccgcctcgttggtaagggtaatgcttcttttcgccatgacggtaatggcatccgtgccatccaatatgatcagctgttttcccgtctggtcggtaataacgatgcttcccgtctcatcgtcgaaaacgatggcattgccgctgcgtgtgataatgctcttgaccttgttgtccttgtcccctcctttacctgaaccggaatggaacaccgatcccgtaacataggggcggtccgggttgccatgctcgtagcttaccataacctgatcgccgacttccggaacaaatacccatccgcgattcttggaaaccgcaccacttactcccgcattaggagtctgcaccctgatccaattggttgtcttgccgtttttctgccagtcgaaagccactttcacacgtccctgtcccttgtcgtcgttgttttccttcaccgtagccagttccggcaacgccaacggtcgcttcacatcgggaacaggaatatgtaccgtaccgtccggcacaccgacaaaactattggagtaatgtccgtcacggcgtacctcatgctcaatcccgacaatacggaacttgcctaaaggaggcagtttcatcctgtcagggaaagaaacatcgatgatttcaccaatccttatccggcaagtctttcctatgcctttgatgttcagaagattggcaccagacgcattctttacaatcctcatctgttcgtccagttccgccttgtccgttacatgggggtcggcagccgaggtcgtttttgcagtatatgccttctcagagcagctgtgtgcaatagactgaaggtcgttcatgccatccggtttggcaggcgtatccgcattatgctgtttgttctcctgcgctacataatcgtatcttgcggatttacccggtaccagattggcaaccagacgtacctcctccaaatccatgtcataaacaatcttctccgtattgtccctgtcaggcttgccgaaatacactttcgtcccgtcataatagaaccactccccataaagagccgaaaggcgattcataaagtcaaagacactctcgttatactgcgccatgtagggtatgggcgccgcatacttgggattggaaaccaaattgacctttccatactcctgcgtcacctcctttattatggtagagagggactgatccatccaagaatcgagtgtcctgttgttctcatacagtatcgtagggcttgttccgtgaatggccactccgcctgtctcgcccatgcttccaaccatttccacttgagtgatgattccctcgaagtcataactttcacccgtctgcctatggacaaatgaaatgctggctgtctccccgatgtagccgatgaatttttccggggtctgttggaacgtattgttaggcgacagataattcaccaccacagtgaaggtgtgatgccggttgaaaccctgacggagatgcagtgaaacgaatttctgttcttctcctttcacggttactttagtagccaccaaattcagaaaacttgctcccatactatcttaaactatgattttaaataaataatccgactggtcggtatgttttttggtgccgaaataaccggaattggtatattccggcaccttaaaactttgattaggaaacaaccattagttgttttccggccaatcctgtacaaatgtagcctcgtccatcttcacggtctgtgcagaaatggcgaacttgattgtcatcggataagggttagccacattcagtgcctcttcgtaatccaccacataaccattttcgaacaccaattccttcattttggcatcttcatccgctttcttgaagacgatgtttccgtttacgggctggtactgcttgaacatcttatccagcacaatggtatcgggagttgattcgatttccacatagattgtgccaccataaatgtcagatgccggacggcctttggggtccacatcacgattgaacttaactctccaggtcagtacatcaaactctcttgagtccgaaaacttaaatgacgctttaaatgccatattctcaaagttttaaattaaaaaataagttgattttgaaatatccggtcaaaggaggcctgctacagtcctatctttgtccttcaatttctgcgcccaacaatatatggcattttctgaaaactacaaagaacttttgatgattttttcttgtttttgccgaaaatatgcccataagcataaaaaaaacactgccaacaatagccgaattattttttttgccttatatttgcaatgttctcctgcgcaatttttaaatcttacgattatggaaacaggagttggtttcatcaatcttgatgattctgtaaaaattgcgcttaacatagcacttgcagtggctcgtgaaaatgcgaacgagtgttatacaccctcgcatttgttgaaggctctacttcataaagatgtagggttaagagattttataataagtataggcaaggatttaggctatctggaggaatgggcggacgtgtatatcgaacaatgcccgaaatccacccagttgtccgaaatcaagccttcggaacggattgacgccgttttccgtgccgcagacgatgcacgaatccagttcgggctgttcgacatcaatcccatctgtgtgctattggcactggcaaagcccggtgtcgctttttccagcgaccagctcaggtctttccccattctggaaaaggatatccattccatatatataggtaacgggcagccggcatgtccttctgccactacggagaagtcctatgccccgacttccgcctcatcctccttcttgggcaaatactgtgtggatctaaccgaagatgcggccaacaagctgcatccggtcatcaaccgcgaccgtgaaaaccgtatggtcatggagatactgggaagccggagcaagtccaatgtcctgattgtcggtgatgccggagtaggaaagacagcactggtttacggacttgcctgggagatagtcagccataaagtgccctcgtttctggaagaaacccgtgtatttgaactggacaacgcctccctgattgcgggagccacctacaagggggaaatcgaggaccgcctgaaaaacatcctgaaagaattgcggaatatcgacaatgcaatcctgtttattgacgaaatccatgtattgctggacaaccgacaaggaaataccggtgcgggaaatgtattgaaatccgaactgtcgcacggcgacctgaccgtcatcggcgccaccaccattgacgaataccgcaaaatcatcgagccggaccatgctttcagccgccgtttcgaggtcatacaggtaagcgaaccggacataaagtccgctatccagatgctacactccgtgcagaaacaatacgtggactaccatcatgtaagaatcagcaacgaagccgtagccgaatgtgtccgtcttgccaaacggtatatcaaagaccgccgtctgcctgattccgccatcggtctgctggacatgacgctctccgccatcaagatggtcaatgaaacaggaaagaagaatgtggagaccctgctatccgggctggatgaaatagaaaaggacgaaaaggaccttcaggaaaagaccgaagaactgaaaacgctgcttttcgtaatgcacaacaaattaagccccatccttttaggagtcatacccgatgaagcggatatccatgaattgcaggagtatgaagaactgaccggctatctgagaaacgcattgaacgtcctcctccaatttgcagagaagaaaatagaggaggtgggtatctatgaggtagccgccgttgtcgccagcaagacaggcatccctatcggcaagatacagtcgcaggaaaaggaacggctactcaatatggaagattatctgaggcgacgcgtcgtcggacaggaccaggccctgaagacattgacggatgccatcctggaatcccgtagcggcatgaacaagccgggacagcccatcggctccttcttcctgctgggacccaccggtaccggcaagaccgaacttgccaaagcactggcggaagccctgttcaatgacgagaaatccatgatccgtttcgacatgtccgagttcaaggaagaacactccgccgccctgctgtacggagcgcctccgggatatgtgggatatgaggaaggcggcatgctggtcaataaaatacggcaacagccatacgccgttgtcctttttgatgaaatagagaaagcgcacccgtccgtatatgacattttcctgcaaatcatggacgagggaaaactgcatgaccgtctgggcaaggaaggggatttctccaactccatcgtgctgttcacatccaatgtaggaagcgagtggctgaccaagcaacttgagtccggcaatgttccgtccaccacccagatcatggaggtgatggggcagtatttccgtccggagtttctggcacgcctgtctgaaatcgttccgttctcccccatccgcgaagacatactcctgaaaatattcgacatacagttcaacggagtcagaaaacttctggacaagcagggtatcggcataaccatcaccgatgatgcccgtaagatgcttgcacacaaaggattcacacccaaatacggtgcccgccaagtggccggtgtaatccgtaactatctgcgcagaccgatttcacggcttatcatcaacgaggagctgggcaaaggaaaaagtctggaggtaggtctggacgaacagaatgaattaacctggaatattcaccaataatcaagtacactatgtttggatataccgtattcttaaagataggcaacctggctgcctcctcactgaccgacatgtacaaggacagctaccagctcatcggttgcgaattcggatttgcccaagggatagatatcaaaggacaggcacagaccgaggtaaaaggcggcacgttttatgtaacctaccctcatcttcccaaccgtgacatgatccagtggatgctggatgcccgtaaataccagagcggagccatcgtagtccatgacaaccaaggctccacactcgaaaagatactctttgagaaagcgacctgtgtggatatggaaatcagctatatccggcagggcaaaagctatattgcgaccaaactgaccgtacaggcacagaaactggcattcggtacagaagagtttgaaaatcagtgggtgttttaaaaacagcagcgttatgggactttttaattttccgcaagtggacagcaacgtgaatgtcatattcagcgttgacggcgacgaatatgcagtggaacagttcaaaataggttttcaccagccagtagataacctaaagaaccaaccggaaggcgaagtgcgtggaggacgaatcatgataaccctttcgcagacggtgaaaagcaacatctacggatgggctgtgaaaccgtgggtgaaaaagaacggggcagttctgttcaagactggaacgtccggaatcgtgtttgaggtggcgtttacgaatgcatattgtgtcaatctgagacgggttatagaggctttgggacaaggattgtcaacaagtctgattctatctccagagagtgtaagcgtgaatggtattgaatttgataatcggtgggtaaagtaatgggcgatattctgaataatagaataataactctagaggattttgagtttctaaaatcaataggagttccatatacaggttatgtcaagggtattggatatacctgtcctgtgtatatgccagcacaggctttcaggattacagatggtaatgtgcaatggagcagttgtgagttacaccctcttttttatcaagctatagatgatagtccagagcgcatctttttgagcatgggatacactactgaagatataattgaaagaataacttatgataatggtaatggaaccataactgttgctgtgggaaaccggtctgtaacttttccaaaagaacaaggtaaggttaatgtgtatttgaatcaggaaggtggtaattattttatttatatagaagctacagattcaaaaggaaatattcttttgagtgattcaaaaacgattcgttcttatatacatgagaaaggaattaaacaagattttgacattacagatggagtgggctttaataaggaaattcttgataatattaatacaggaattggagcttttggtattgggttaggtgcgaaaactgaaataatagattatggaataagaagttttcatggttattcttggaagcagtttaattcactcgataaaaagcagcagttacttaaagaggctcaagcaattggaaaaaccgggactaaatatttaaaaggtatgaaaatgcttggaaactggagttcgtatgcttctgctggttattctgtttccttaatatttgtagaagatggaagaacattggaaaagaaatttgttaaagcagcattagatgtgggatttacctatataggtatattgggaccatggggatttgctattagttctatttactatttggtggatacagctacagatggctttggatattttaatgaataaagttatgcataaaatcttagaatatttgttttataaaattcaagtattgactcgatatatggacacaagtatgtatttaaatatacatgttccatttattatgtctacagtcttattattctatttggcagatattgcaattatatactattatattataatgggatattcaccacaaaaaaatccaagtaatgtgtttttggtggttttcattattatgattttattatggagtagtctctatttttattatcggtataaacatagaaatgaacgaattatggaaagaaaaatttatgaacatagttctaatgtatgggcatatcttttcatatttactccttttattgtattattaggatttgctttattttttagggtgtccagttctacgctctcgtttttggtattgatttaacaacttaagatattgattattaactataacactattgtttttaggtacaattttaacatacaaaaaagcatagctaattcattgaatcaatatattttaaagagatatgattatcagcactttggaacttgcatcatatcttttttgaactaaaagctggaacatcaaactggacaccctatttatttttttaatttcattgtttatgaaagagtataaggtattaataatttatacaatctccaatgatcaatcaaaaaagtcatttgaagaagaactggagagatacggtctggaacgggtcgggacgcaagatatctttgcccttcccttagaggaataccggacaaaggtacaggcattcaaagcctacctgcgagcctatgtacgcaagcatctggacagccaagacacggtactgttcgttgaatcacgcatgaacgaggaacggaccctgaccgccatgctgcaaaccaatctgatgagtgaagaagaataaaataacataaggatatgagtgcacaatcgtatatcaagttctggacagccgaaccctcggagcatgaagaagtgcaggcatacgacctgctgggctacgagtatgacttccggaaagaaaccactcctaacggaaaggtaaccgggaagacctacggcggtaaaatacgggtaagcattgccggatttcctacagaggaactcttggaatggatgttcaattcaagaatcctgaaggacggagaggtgatgaacacttccggcctgcccggtactcccaaagagatcatccgtttcaagggagcaaaatgccttgatttcaatgtgcattcaacaaccaaagagagccgtacctcactattcatccacttccgggaaatggagaccggcgattcgtgtcacttaaacttataatcatgaactggttcacttcattgttcagaaacaaaaaatcctcaatgccggatgaccgctacgtgatgcggctgtccgtctgccatgagacatacagcattgaagagttcgacctgcaattcaagcggaatacagaccgtgacggattgcctgaaggtgaggcatacggcggattcgtcacctgtaccctcagcgggatgccgggtgacgagctgttgagatgggccgcatacagccactcccatgaagacggcgaaatacggatctacctgaaggagcaacccgaccaacaagcggcatttgccttgcgctttgtggaagggaactgcatccgtctgcaacgcaaggttgaccgtatctccaattccagcagcatcgtccttctgtttgccgcaagaacactaaaattcatagacgaagaatttgaaaacgaatggcactgacaagtatggaaacaaagttttgcaaattgcccctggattttgaagccttgctcagcgaggatgtggaaaacagccgtcttgcatcctgctcggaaatcgagtccatcgaccagtttatcgaactgctgatcagtacggctcccggcgaacatgcctttgacaaggagttcggctgtgagatcttttttctcgactttgaaagcattgtctcacacacccgttgggaaggacaattctcggaatacataaccaaggcaattacccggcacgagaagcggcttacgggtgtaaatgtacgtgtcatcattgatgacaccacccgacaggacaatgtatttgatgctcccgccgtaaagaaacgtgtacaagtatatgtatatggaaccctggtacataccggagaaaaacggtgtttctattatgtaatctatttaggaccgatttcaacccgatgaaaggattatgagtacagaaaaatacaataaagagcaaatcagaaaccgtatgctgaaatacgctgcggctttctggggaataaaaaaggcggaaaacttcgacccggttgtcaagctcctgctggaagcattgtccaacgagatatatatgctgggagaggattttaccgccatcgagacaaggctgctggaaaagaccgcccgaatccttaccccggacatccttacctcaccctttcccgcacacggcatcgtacacgcctatcccatagaaccgtgttacctgataacccgggaatcgggcatgtattacgagagcgactcgcttactcggaagctatcgaccggaagcgtatcgttttatcccgcctgcgataccctgctgcacaaagccgacgtgaaatatatggtctgcgacgaccttctctaccggatagcccctaccttggagaagaccatgattgcccgtgcagagacaaggatgtctccgcgtaccgtctggttaggaatggcggtggatgaatccatttccgaccttgaagacttttcgttctatctagattttcccaaccttacggagagctatgaatatctgctcctgctcccctgtacggaatggtccgtagaagggaagacagtcgtgatggaagggggaatccatgaaaagacaaccatacagaaagaaccaacccgtgcctttttccaagactatgacgtaatgtccgtcatagacaaggaagtcatggatatttacagcaaacattttctgaaggtatcgcagtcctttccactcgacggttcctgcaggaaaaaccttccggacaccctgcggtcctgtttcaaagaggccgttctggagaagatgcaggacaagctggtatgggtgaagatacagttccccgcccatttcacaacggaagtccttgaagaacttcatgccggcatcaacatcgtgcctgtagagaacaagacgcttcacgaacagacgaccacccttgaggaaactttcagggtgatacccttgcgcacgggcagctacgaatcccttctgtccgtacacagcgtgaaggattctgacggaaagaactaccatgaactcctctattccgcaaaggattccacggaaagctatggaacctactccatccgcaaaggaggatgcgagcgtttcgactcccgttccgccaaggagctgctcggctatctgtccgacctgctggatgacgagacccatgccttcaatgccgtatcaagcatcaagctacaggcacttaccatccagatggagcagctgatggcgcaaatgaaacagacagcggacaacatgaacgagttcagggaaacaccttattaccttatgattgacgaattgtccggcaaggggcagattaccgtcaaatactggacaaccaactgtgaggtaggaaaccggatacaggcaggcgtaaacctgtcccccaatgccaccacttacctggacccgaagacactggctctggtcagtaccacctacggcgggaaacaagccccccaaaacagagaacggattgacatctacaaatacgccttcatttcgcacggccgtgtcctgacacagaacgacatagccagcttctgcaaaaaagaactcggagaactgctggtgcggacagaaatccggaacggggtggaaatcagcccgatgccgcacgaaggactgatccgaaccaaagaagtccatctgattcttggaacgaaactggatgagccttcgcaggaaaaacagataaaagacaatctgcgtaccaaactctcggcctgttcgccggacacattcaactaccggatattcatagaatacaataaagcataaataccatacttatgaacccagttacccaacatctcatttcatcgtacctgctgatgccgctgctgaccgtgattttcggaatcgcggcctattttatcgcacgcaagaacaaactgctcaacaacaaaaaactgattgcgtatctgctgctgtgcggcataatccttgccctgcccggcctgtccggattcatggactataacttcatgccttatgcctacatcctgctggtcatcctgtactggactgccggatattacaaccggctcatccttcgcaaagtgttcgcgtcaagcaaggaaatgccttctttcggcatccaatgcctgctgacggttacggtcatgcttctgggagccggactcttttccgtagtgttcaacctctgcaacgaactccagtacggcatctgggcctccacctgcctgctgccctttgcatttccactcctgtattcccaaacggtgaacagctatttcgacatacccattgaaatttataaagtatggaaatattcggaggaatatgactcggataccttgtacatcaaccgtgaacggagcatcgtaatggatgtggacatattccgcagggtggatgaccccgcatcggaacgcataaccggcaaggcatccgaggatgtcatcttcgggcagtggttccagcgcatgattgacgactgcaacctcaaatcaccgtcttcgcccatcgtatataagaatgaaggaggagcctattacgaatgggtattctataccaaaccgtcctttttcaagagacggcgctatatagaccccgacgttacacttgccggcaacaagctgaaaagacacgatgtaatcatagccaagcgtgtggcaaacgaacttataaagtataacgaatattaaatagaaacattatgataggaaaacagagccaaaagaaaaaatatccgctggtaaactgggcggacggaatgcccgtcaacaaagggcatttcacccaacaggaagaccactttacggaccggttgtgcgaataccagtcgtttcatctgaaccgcaatacctacggactcctgccattcaagaaaggagaaccggtttccggcgatttcagcattacggaactcgttacaggcaccttggaagtccgattgaaacgttgccacgcccttacttccggaggttacctgatagattatgatgccggtgaggatgacgaactcaccgccagtttccatatccctacagaagaggaagaagaaaaggacaagcggtgggatgtcatactgatggcagaccctttcgagcatcttccttcgggtattccgaacgagaaggaaatcagtccacgccagcccaatgccttacccaaatatgcgttgagcgtgctgccgagcggacagaccgacggaagcgagctgggaagacactttctgctgatcggccgcctgcgcaagaacggaaaccgctgtgaagtggacggaaacttcatcccgccatgcacaagcatgtccagccatccggacctgaaaggctactataccaaattcgggcaactcgtggattccatagaaaaagcttcgtttgacatccttgccaaagtggagaatgcagaaaaacagaccagcctggccaccaacatcggtatgctgtgccgccatgtcatgctgttcatatccgatatctacttctccttccgcaacgaggggcaatactattcaccgctacacttcctgaatgtattctccacattggctcaccgcctgtatgtatgcctgagtttcatggacaaggaagacaaggaggacctgctgaaatacttcaacgaatggaacggcatcactcccggtgcctacgaaggcctgctgagggaaaattgcgggctgctgtacaaccaccacaatatccgccaactgatggttacggcggaacgtttcctatacctgttcaatgacctgtggacaaccctcagccgtctggaatacatcggcaagcacaaggaaaacatcgttgtcgccgaacgctccagacaaccgaaagaatcgagcgagtcacgctggaacatactggactaatcccctataagcgaacggacatgacggaagaacaagataaaatagtacggtttgacgaacattcccattcattcaacctgccggataccgacttcaaggcggaagtggtggccagcggactgaaagaggccgggtatgatgcagagcgtaccctcatattcagacggggagacatccggcgcggattctcgaaagacatccatgacatccacccggaatattcccattatgacctgacggattacctgtatctttatgtgaacaggagaagcctttatgacgagctgcccgaaggcatattccacaagaacctttaccagtccgagaaaatatcgaaggaacaggtgctggacgaaatccgcatccaccgcgaagaggaatttttcgcccgccgtttcttcaagcctttcgaaatctccctggaccatatgctggtagccttccagaataaggaacgccgcattgacgagatgaacgtacatccggatttcgtaagcatcttttccggtcaatggcccgtactggaactgctgccgacccatctggcggtcatgcttatccatatgctggcctatatggaacagattacagcgagcctctccaaagccggcgagtgcatgaccattctgaccggtgtgcccgtgcatatcaagagaggagacaaatgcgtggtggaagtggattcctgccttattcccaaattgggaagctgcattctgggagacgacatggttctgggaaacagttttgccgacggcacctaccagatgctggtagaaatcggtccactgtccgcccgacggatggagagcttctttcccggcgctgccgacagtaaaatactgaatgcgctgacagaactgttccttccctcggacaaggagatacagatccgctacatcatccagcaggaagatgcccggttcaggctgggaaccccaaccgaacaaggcgcctatctgggtatcagcacctatttatgaatataaaacatcatcctatatgaaaccgaaaaacaacacagaagtaaggaaagcctatctgagattcgcgggctatctgacatgctgcaccatccttgcggtaagcatctttgcctgtttcctgaaaacctccggcatagaagtaaagcgaatcacggagcaggcactggaatatgaccatatctatgccaaagagctgtccctgtcgaacagcatggactccatctaccagtacatgaaactgatgaacacttcaccgcaaataaacgacaagctcctgcaaagcgttgtcagtacgcgcaagatgaacctgctcaaatatgtccaaggcatggacaccaaagattgcaggctttacaggcagctgctggaaaacctcaacatcttcctcggggtaaaagactccatccgtctgctgaatatccaggaagagatggtgaagaaagacctgatgcagtgcatccaagacaactggaaaacaaggcgtaacctgaatgtgggttccggcggcaacaaacaataaaacggaaagccatggacaacaacagaaagacaatgaacaaacgggaaatattcatgggacatgcctatgtattcctgttctttttcctgacaaccgtagcgtgttgtctggtaatcttcatgtggaactcagatttcaagatgtttgaacagaaagagttcgtaaagatcaagatgaaccgcatcaaggatttccagcaggaacaagcggaaagccagttgccggtggactccctgttccgtaaaatagaaacatttgaaccgggcgtttacgcccagtatgaagaagacgacatccattatctgataaacaacctgcggaacacatacgaaaggaacagctgggacaagcgatacaagctgttcatgcacattgccgacttttatgccatgtggctgtccgacaggaaacagctatggagtatcggacaaaacataagtctgttcaaagccaatctggaggagtgcgagataggcttgcagaaaaaggaggaagacttgcgctcaggaactaaaaacaaatgacatgggaaaaatttataccagaaagattctgttcgtaatcgcagccatgctgctgtgcatccttgtcgccatactgatccggctgttcttttccagccgcaccgtgcgtatgacactgacccccatagaggtggaaaccggagaaacggtccattatgcagacagcacccgcaacgcacgctcctggctttgggaattcggcaacggggacatatcacacgaacggagcggagaatacgtgttcaagaaaccgggacgctaccaagtgcgccttcaagtggacggaggactggaaaggaaacagatcatcacagtacacaggagccgggatgattacggaagcgacgagcttgtcaggatgaaagcaccggcaaccgcctttcaaggagaaatcgtatctttcaaaggatacggtccgtcgaaagaatggcgctggcagttcggagaatccggaattgtcgattcgcgggagcagaatccactctacgcctatacagaacccggcatatacgaggttctgctgactacggagaatacccaatatccggtccggcacaccattgaaatccttccccaatatacggagaacgactcgacagacgtgcttgtcatcatcggcaatgacatccgtgaacacttgcaagccatcgtggacggcaagccgttcaatacccattacaattatatcctgaagaaatacctttgcggaaatccggacatagcggtaaccgtcaacaacagcaagaagaatgatttctattcctattgccaaggactgaaaatcatagcacgcaggaaaacccttatagacgaggtgttcgtcgatatgggagacaacctgagcaacgaatgtgtgatgcagctgatggtaacacagcacgaacgcttttccgaacaaaaaaacaaatgaggcatgaaaaagaattgcatatcgacactcataaaaggaggatggatttgcgggtgcatcatctgtatggcatcctgcggaccggtacaccgttttatgcggataaagaatgtaccccgtgaatatatgcgaaactattccatagaaggggtaaaggctccccgcagccagacactgcccaagcataccccgtggattgtctttgccaatgaagcaggaacatcctatctgagtccgagcggaaagaacgagatgcagtctgtgaaatacatggacgcatttctcgtcatcaagcgaaaaggagactggctcagagtcattcaatacgacccagccattctgaaaaacgggaaactgaaagaatggaaacaggcaaaatactgcggatggatcaaccaaaacgacctgttgctgacccggagcggctttaccgacattgttaccggattcaaaaacaaacaggtggtcatgctgaacgacagcgtggcattggccaccccaaaaacgtattttgccaacgactccgtaaaactgttcaaaaatacagacctgacacaagaggctggcaagattccattttacagtgtcgtatatccttatcaaatatcggaagacaaaggatgcaccctcgtggcagacaagccgcagcttgacgcagacagcatagggcatgctgtcatcggatggatagacgaacgcctgctgaccgcccccgaacagcagctccatatagacataacctcgctgccggacagcacgcttgtttttaaagacagggaacggaaagacaccttgccgctatcatccaacgacctgaagcggaaactgcaactttcggccagccagcctgctatccgctacagcccggtactgtcctaccggaacaatgacacgagcttctgcttcaaaacccggcttccgatgccggtcatcgacaaacgggaaagctatgtgctgaatgtcaacggcaatccaatctattacgggactttcaaaaacaagatagagaaggacctgcaaaaaataaacctcatgtttgtcctggaaggaaaagagaacaccatccaacggtttccagccgtggtgaatgccatccaaggactgcaatcgcaactggtgaatgacgacagcttttctttcaggttcggtgccgtgcttaccttcaacgaaccggacagccggaaagaccccatctgcaaactgactcccgactacatggagctgcttgatttcctttccgccaaagcacgtaatgccgagcaactgaaacctacatacggacgattcggcagctggtccggccttcggatcggagtggagcaattcaacaaatgtccagatgaaaccaatatcctggttgtcatcggcgataaagggttcaacagcgagtgggcagactccaccttggtgaacaagctggtaaaaaacaactgccgcatgatcggcttccagctctacggaggagaaccggataacttcaacaacttcgtgctgcaaatcgggaacatgatagattgctcggcaccacgcatcagccggaaaaaacgggaactgattgtatatcccgaacaaatcagaaatgaaaacgaatatgcggaggtgaaccataacacctattgtctggactttccaaatcggagcatgacacagggatggctggtgtttccgcaaaagaacgaatcgctggaactggaaggactgaccaccgccgtggattccatgctgatacaagtgaagtttgacaataccctgctgagcaacagtctggcaagggcattcgacgaagtgggtacacaccgatataggacagattcgacaatgacagcttattaccatatccgccagtcgggggtacaccccatgctatccgtacttccggataccgaacctgcctggagcctgcctgcacagccaatcgtactgccggactcgctgtcctccacactggactattatctgcttgtcaacgaagaggagttcaaacggttgagaaagtatgtggaagcaccctccaagctgatcgttgactataaatacgaagcggtcaaaaagaaaaagcaagcgaaggtggatatctgcgactgtccggacgactacctacaggcagatgccgaagaatctaccgtacgtgtaaagacggacagcctgaacgcaccggaatatgcctcaacccgccgtgcaaggagaaaactggtcagacatttcctttcagagcgcaacagggacagatattgcaaggtagggagaaagactttcctgagaatgcccctatcagaggtcttgcaaaggtttacctcctgcccgaccgactatcctttctttgaagtttaccgtgtcaaggacttgcggaaaaagaaaatgattacggatgcggagctggacatgctgattgaatatttcaaggaaaagaaaaaactgctggacgaagccgccggcaagccgttccagtccaacgggcagacatactattggatcagccgtgacctattaccatagtcattcacctgaaactgtattatcatgatttatgaaactattctgaaaataagaggaatggaggtgccgatactctattataactatcggtgccacatccggcactatgatgacccgaatctgagaaaaatcatacaactccacatccaagtatgcgaggaaatcggcaatcgggagtgtctgccggtcgagggagacctgattacgcttgcgtttgagtgcaagggtgaagaacagttcttctatgactggctgaacgaaggagccatgcacaacggggaaatccatttcatctacaacgaagtggagattgcggacattttccggttctgggactgcttctgtgtgaaaatagaagagtatatgagtgtaggaaactctccgatgatgatggtgctgtatttgtcaccggggattatcaaaaggaataatctggaggttagggagaaggtgtggaaggtgtcggatgtttcaattatatatcaaacttctaccgagaggaaagatgattcggttagcaatgattcaaataagaaaagtctttctgtaatttttgtaaaacctccatttcaattaaagaagaaatttcaaaaagatccattttatgaaattgaaatgaggaagcaattgcaaatgcagcaggatggaataaataatatgactatatttgagtggctgaaaaatagggagaattttaaaaaatatgggcgtaatcctaaatctaagaaaattcaagaagattttagggatagatataggaatgctaaaattgatgagtatcttttattgtatgaagatatggatattaaggctatagaggcaatggttgactcagaattggaaggcttagcagcattacataatcctgatcagatagcaggaggatatgttgatgtggtgactcaaatgggaaataaaagaataaattcgtccattgggtcacaatggggaagtatagaaaaaggtcgttctcttaatattgaaaatgaattgttaaaattaataacagaccctcctcctataacagaagaggagcagaaaaaaataaagatgaatgtaaatttagttgaaaacttagaaattgttaagtagtatgtttgagaaatttttagaaagaagtggaaattctataaaattggaagagtttagtgaggattatatccgacaatacaataatttggtttcggaaaaactaatttctttttggagaatagctggtattggcatttattgtaatggcttgtttagaactattataccgaatgactatcagtatattatagaggaatgttatcctatgtatgattatgaaacagtgactccatttatgataactgtttttggagatatttttgcttatgttaagaatcatgtaattggagattacgtcgtttttattaatataaggtatggaacttttaaaattctatcagaaaatattgacatattgttaaatatagtaattttcaataagagttgtcttgaaaattggtttttattgaatgaatataatacaataaaggaagtgaaggcgatgcctaagatagatgaatgttatggctatgttcctgctttagttgcaggtggaaaggattgtattgataatattcaaatagtaaagattgctccttatattgatacggttattcaattaatgggcgatttaaaaagaattagataatatcaaatcaacacatatgttacagaatgtttttaaggttgatacaatagtttatgtttcaattaatttaaattatgattatagtatatcttatatggaaaatatagcccggaacttcacgaagaagtatccaagctatcttatccataagaaaagcgaagacaagataaaagcctttctgaccgacagggtgaagaccaaagtggaaacctttgtgaatgcagaggcaaagaacgtggcagtaaccgaggtgcgagaaatagcagacctgatagcggaatatgaaggtgcagaaagttcttcatcttttggaccccatcctacggattccccctctttaggaaacaccggagtggagcttgccatgagtgtagacacaggcgcatcggacatccgtcctgtcaatgtagccaaacccacgggggcaacaggaaaacccaagataatgaaaagaagtgtcatccgtgtaaccatggaactggaagtgcagatggaaaccaaacaatacttgcaattcctgcaacagattccagacctgttcagcctgcatgaattccccaatttgagatgccgcgtgatatgcaaccagaaaaaggcaacaatcaacgaagagccagcaccggttgaagtgaaggttttggatgacagaaaataccagcggtggtttgttgcctttacactgttgatggtatgctgcatgggcggaatcatagccctgttcttttccattccgaacctgtacaaacaggacatccacttcctgcggaacgatacgattcatcaggagttttccatttccaacagccgtattgacttgaaggatgtaagcctgacgaatcatggcgggaaagacacacttgtcatcaaggataaaaagataatcatagccaaataaaaagcaatggaaaattcgattcagatacaagggataagaaacatgctatcccatagcggatgcccggaagacctgctggaaagttacctgcaattcctacaaaccgaaggccaacaggtgcagattgtcagaggagaagtctttatgatgtttgaaaaggaagcgcaataccgcaagagaaggaatgaaaagatgaaaggaaccgtaactttctgcaaaaacacgaagaacgatacaggggaatacaatacaggagtgttcatcggaatggaatttatccaatgctgcttcaaccatgggattcctgcacgggtgctgaatgtgcggagagtacatggggaagtgacggagattgtcgtggagttcgggaagtagatgaaaggaatacccctattgcagagctccgacctaataatatgtgggggaaattgatgggaaaatccccccacacacttcatcttgatatttaatgagaggaaggattactccttcttggatgttttttcattatccagccccaatcgcttgcataactccggatcgtttttgatacggcccatctcttcgttgatgatggcctgcgcgtccgacttgatctggtcgtagttacgctgaatctgctgcatcatgatgtcattaccgtccttgtccttgaattcgttgatgaaagggattttcctgtaggccttttcttccgcactgaccgccgcatggtctacaacaatttcggcatggaatattttctgttctatcttctcgccaaaattatccgccacagccccgacaaacgtaccttgcgacagattggcaatcttggatgccgggataagcgagtcaagctgcgtgttgatggaagtggaaacatcctgacggttgatggaaacggactgacgctgctggagcaccttgccgaagcgttcagaaagtgtctttgcggtttctccgaccacctgcccgctgaatatatttcctaccgtgttctgaataaccttggactccttttcaccataatcgcgggtcagctggctgaaatcctgaaaacccaaaagtacgcccaccttgttgcttcgtgccgttgcaatcagattgtcaagcccccggaaataaatggtgggaagctcatcgatgattacggcacatttgagctgtcttttcttgttgataagtttgacaatacgggaattatatagtccgagtgcagccgaatagatgttctgcctgtccggattgttgccgacacaaagtaatttgggttctttcggattgttgatatccaacgaaaaatcatttcctgtcatcacccagtatagttgtggggaaatcatacgcgtaagggggatttttgccgaagcaatctggccctggagctgatcctgcgcccctcctttccatgcatccatgaaaggagaaaggtagttttccaactccggataggaagtcaggacggtgaacaggtccgaataaggcttgttcagtaattccaccgcatgcgggaacgtacaataaatcccgttcttgtaaatcttcaaataccagattattgcagcaagcagaatgatgggggattctacaaaaaagtcaccctgcttttcaatccaggtgcgattgaggttgagcattatcgtatagctcgcctcgtacgcatcggaaatgtccgtcataaattccggattgataggattgcatcggtgagacctgcgcggatcgtcgaaatttatgacatagaaccggggcttgacctcgtacttgtccatattcttcaacaaagaattataggctatggtggacaggtcatcaaacttgtaatcgtagatgtaaatcgcaaagcccttggctataagctggcgtatgtaactgttgactatcgcataggacttgccgctacctggtgtcccgataaccatgcaggcacggaaaatattgacaatattgacaaatccgttattccagcgttttttataatagaatctcgttgggagatttaccgaatactcattctccatcagtcgggtttcctgcatgaaactctcattttccatattgaacacatcttccatgaggttgtgcctgtaaaggcggctcatccatagccccgacatcagcagggcgagatagcctgccgtaagagtaaaaatatagaatgcggtatttgccgcgtgcggcaatggcagctcaagcaaccaccagtttagaaagaacagtgcgcatcctgccaccagcgccgcataaattttaggccaggttatcttttcacctttgactccgtgcgtacccagacaggaaacggccagcagaagcactgccaacagtttgctccagagaatgcagttgaaaatcccggtcgtattattgaaattcaccagaatcctgtccatcaccgcaaggttcaagtgccacgtggtgatactcggataacaatacacatagacgtgtaccaccaaaagaaaaatactcacggccctgccaaattccatgatcttggcaagcgccctcaaatcgtcttcctgctgcataagaattgtatataaatgggttgatacttgttttgtctaaatgccacgtttgcgtccggtcttcttctttttcttcatgcggcgtgcaaaggcttcctcctcatagtcacgcgggttggtttccatcgaaagtatgcccgccgccagttcgagcgtgctgccggattcgtggcggtgatgctgccgaagttctgtagcggaatgtccgccccgttccttttcgggtatgttttccaaccatttgaaatagtcgttgaacacattggcggaaaactccttgcccatgcgtgaaccgttgaacacttcccgtcggtcgtggtcaatgaaggtgacaccgtagatacgtccccgctcattctcacggaacaccacatcgatatttttttgccccagcagttccacaaaccgtttccgtgaatccgcctgccgcaaggcacgggcgatgtccgcctgtatggagggtgcccattttccctctttgagagctttcagattcatcaacatccgcttttccaacagttcattcccgaagcgttttccgaaacgtgaactcttgaacggcggactgaccaccttgccggtatcatccgtggcagaatagacaatgccggtgtagggtatgccggtgtactcccccctgacctgtttcgcctcgatgttgagtgtggaaagcagtgcgctgtattccccgaaagtctggaaacggtagctttccagtacggctttaagggtgttgcctacctgatggcggacatcccccaaggaagcatccaccttttttagttccgctttcggattccgcctttccgtgtccgctccgttgcgcaagccgaaatccgtttccagttcccgacaggcggtcatggaacggcggtgctcgtaggcgtcactgatcttttttccctgtccgtctacacagacactgacgatatgaatgtgggcattatgggtatcggcatgtttgtaggctatgtacggctgattcccatagcccattttctgcatataccgttccgccaactctaccaattgcccatcagtcagctggtcttccggtgccggagaaagggagatatgcaggacgggcttctccgtattgcggtttgccagcaggtagttctcaaaagagagcaatgccagacgtatgtcctcactgggcaatcccaatctgtcggaaatcatgcggttgcccgaaagaatctcggcggtacctgccgttaccttgtcgtagttataggcaagtgctccgtaaaggcttgttccgtgacttatttttgcaaccatttccgctcgtattcctgggttagcaccatgacttttttacatacaagcatcagttcgatgctcagtttctccaacctgtagagcaatgccatcgcacgtttttccccgaaattgttcttcaaggtccggacaacctgattgtagttgtttccgacggcctgaaactgcctgtggaattcggtcagtttgatgtagtagtccattgtcgccttgtcgattttcacaactttaatctgtcccgaaaagatggatttcttgatgaacagcgtgcggtccccggctcccgaatccgccagcaatttttcaaatcttgtgttctcctcggcgttcaggcggaagctgtacttgcggtccgccggatcactcttgggctttctgcccgtccttgtccctgttgttttctccatgcacatgagatttttggtttgtacttttttctcttccggaatccgcgactttggagcggattcccccggcttttagccgggctagttgtttttgtcggacaaaagactttttgtcggacgaaaacacaacttgctctgttcgcttgaacagagaaccctccttcgtcggattgctgcgcgacgttcacggaacgctgtgatccgacgaagtcagttcttttccatcgtctgattccgattttgcaaaattagacagtgataaccgattggtaaacagcgtttgatatgacatttgatgacatctgatgacatctgatgtcaggtaggggaaatgttggtggaagtttcaaaaatagccgctacttttggcacagtgcatgagggcatacattgaaacattgtcctgtaaggggtattgcttgcctgccacaggtggtgcatggtgtgaatgcggcatcatccatatatgtgcaatgccatatatgctgcacgacaatcctgcatgacggaatacattgcatccgtgcaatgcagtatgggatacattgaaccccatattgcatgaatgcaatgcaccttatatggcaatgcccatcggcaaccggtattacactggtgcaatatggtatgcaatgtattcatgcaaaccggcaaacaatgcgtcattgccgtataccaacggatgcattgccgtgtgatgaaacgaaaaaatccggacagatatgaaacaaattatacactctaaattcaagcctatgaagaaagaacctttatttgtcgctttgagcaaccagaaaggcggtgtgggaaaatccacgttcacggtattgctcgccagttacttccattacctgaaggggtataacgtactggtggtggattgtgattatccacagcacagcatcagtaccatgcggaactgggaagtgggaaacattgagaagaacgtgcatctgcaaaaccagctggtggaacagttcggagcaagcggtaggaaagcctacagcatcctgaactccactccggaagaagcccgggaaacggccggacgctttcttgaaaaatcggagctggattatgatcttgtcctttttgaccttccgggtaccgtaaatgtgcccggtgtattccagtccgtaatcaatatggattatgtattcacccccatcacgcaggaaagaatggcaatgcggagcagcatgtcttttgtccttgccatccgggaatacatgcaccggcataaggatgtacccttgcgtggtatccatatgttttggaaccggatggacaaacgtgtttccaaagacctgtataacggctatactgaaattttccgttcgctgaaattgccggtactggaaaccgtcattcccagtgcagaacgttacaaaaaagactccggaatgaaagggcctctgttccgcagcactttgttccctccatcttcctccgcaatgaaaggaagcagtctggacctgctggcagcggaaatagaaaccatactgaaacttcaataaaaacaattatgactaccaaaagaagaacggattaccaagtggatgaggaggcattgaaacgcatgatggcaggagatgtgaccgctttggaaagaacggttcctccggaagaggagccggaaacaaaaagtcaggctggaccttgttcggagaaacaggagaagaaaagcggttcttccagacagcaaataaaaaaagcaccggatggagcggctgattcagatgaataccggagccggtttctgaaagtgaaactgtcgggagcaagaaggcagacctatattaacgatacattgtacagaactgttgccaaagtattgccggtcattgcaccggaaatgtctgtccccatgtttttaggaagtgtactgtcagaccatctggaaaggtatcagcatatcatcaatgaaatatataatcaagaagcaactcaaaagccaatagaatggaagaaatagtttatttatcaatacggttcggctgtaccgcttatctgttatataaggtatggaaacaaaaagagagaataggtaaaatctgtgatctgctttgtactcctcgcaatcggccacaagcagaaaaagacaacggtgaaccgggaaatgcacaggatgtgatgggagctacccgctttgtctatctggacgagaatgccgggaagaccgtcgccccttacatgagccagcaactggaaaccggaagtgattttatcggagcggataaggatattccggaagatgaagtggaatgcaaactgcctttggaggagatgagaatgctgaaagatgaacaggaggaactggacagccgctctcccgaaacggaagccattgctccgatggttactcctgctgacctgctcaatgtaggcgacgtgctgcttaacctgaatggcgccggctcggacgagaacaaatcatacagggcggccatgacactgcattccatccgggaaacggacatgtttgaactgttctcctcccaggtggagaacaagaagctgattgaggaactgatggggaagtatgtggataaggaagggaatgcgttgcctttgaaaagagagaggaaagaaagcaaacatgttactgactggaggaatctagtctgaaaaggcaatatttatcatgttcggaaaatcctgtatgcgttaaagtatatgggattttttatatgatgtacccatttaacgaaaacatgcaacaggcattcttccaaagtggaggaaacctgttttttctttttcatccgttgtacggcaaagacatctgatgacatttgatgacatctgatgacacctctgaatcatagcgtattatccccatttatctttgttgtcgaattcaaatttatgtcttacccaaacgattcgacaatgaaaagaagaatccttttttctgtgatgtgtgcggtcatcgccgcaaacacctttgcgcagggccagggccttgcgggtatcaacgaggcaaccagcctcatgacctcgtatttcgatcccgccaccaaactatgctatgccatcggtgcggtgcttggtctggtaggcggtatcaagacctatggcaaattttccagcggagatcctgacacttcgaaaaccgccgccagctggttctttgcctgtatctttctgatcgtagccgccaccatcttacgttccttcttcctctaaagcctatggaatatccggtaaacaaaggtgccggcaaccccgtcgagttcaaaggactcaagtcgcaatacctgttcgtctttgccggagggcttgcgatggtgctccttatggtagtctttctttacctgacgggggtggaccaatggatatgcttatccttcggaatcctgtccggcagcctgttggtgtgggtgatattccgtttgaatgcccgttacggtgaacacgggctgatgaagctgctggctgaaaaacgacatccacgctatctgattcaccgcaagagagttttcagattattcacaagaagaaaaaaacaacaatcatgagaaatgtattaaaggcggaaacgctggaacgcagattccccctgctatcggtagaaaacggctgtatcgtgagcaaggatgcagacctgaccgtggctttcgaagtggaactgcccgaactgtacacggtaacggcagacgagtatgaggccatgcactcctcctggatcaaagccatgaaggtattgccggaacatagtgtcgtctgcaaacaggactggttcgtcaaggaaacctaccgtccgaagaccgatgacggagaacagagcttcttgacacgcagctatgagctgcatttcaatgaaagaccttacctgaatcacaaatgctacctgttcctgacgaagacaacccgcgaacgcagccgtcggaagagtgacttcaataccctttgccggggattcctgttgcccaaagagataaccgacaaggatgctgccgcccgctttcttgaggcggtggaacagttcgagcgtattatgaatgattccggacatataaggcttcgccgtctggaaacagacgaaatcaccggtacgaaggaacgtcccggactggtggaaaaatacttttccctctcgctgaaggatgagaccgccgtattgcaggacatctgcctcaagcccggcaggatgcgcatcggtgacaaacgcctctgcctgcataccctttccgatacggaagacctgcccggcagactttccacggacatgcgctacgagaggatgtccacggaccgcagcgactgccgcctctcctttgccgcacccgtaggactgctgctgtcatgcaaccacatatattcgcaatacgtgttcatcgacgacgcacaggaaatcctgcagatgatggagaaaaactcgcgcaatatgctctcgttgtcaaaatacagccggagcaatgccattaaccaggagtggacggagatgtatcttgatgaggcacataccaaaggagtgcttcccgtcagatgccactgcaacgtcatcgcctgggcggaggatgcggaagagttccgccgcatcaggaacgacacgggcagccagctggccatgatggaatgcacgccaaggtataacaccattgacacaccggtcatctattgggcgggaatccccggaaatgcaggcgactttccatctgaagaatccttttataccttcctggaacaggccgtatgcctctttgccggagagaccaattacaggagctcgcccagtccgttcggcatccggctggcagaccgccagaacgggataccggtgcatgtggatatttccgacctgcccatgaagcgaggaatcatcaccaacagaaataagttcattcttgggccttcgggcagcggaaaatcctttttcaccaaccaccttgtccgccaatactacgaacagggagcgcatatcctgctggtggacactggaaacagctaccaggggctgtgcaggatgatccatgaccgtaccaacgggaaggacgggatttacatcacgtatgaagaggacaatccgatatccttcaacccgttctacaccgaatccggaaaattcgatgtggagaagcgtgacagtatcaacacgctgatactgaccttgtggaaacgggaggacgagtcgccgaaacgttcggaggaggtcgctctttccggagcagtgaacgcctatatccgaaagatttcggagaaccggaacatcagaccggacttcaacggtttctatgagtttgtcgccgatgactacagaagaatgattgaagagaaaaaggtgcgtgagaaggattttgacattgacggttttttgaacgttctggaaccgttctaccggggcggagattatgacttcctgctgaactccgacaaggaactggacctgacaggcaaacggttcatcgtattcgaactggacaatatcagcagcaacaaagtgcttcttccagtggtgacactgatcattatggaaactttcatcgccaagatgcgcaggctcaaaggtatccgtaagatgatattgatagaggaatgctggaaagccctgatgtccgccaatatgagtgaatacatcaagtacctttttaagaccgtcagaaaatatttcggcgaggctgtggtggtgacacaggaggtggacgacatcatcagctccccgattgtgaaagaggccatcatcaacaactctgactgcaagatcctgcttgaccagcggaaatacatgaacaagttcgagcacatccagcggctgctcggtctgaccgagaaagagaaagggcagattctttccatcaaccaggcgaaccatcccgggcgcttctaccgggaagtatggatagggcttggaggaacctgctcggcagtatatgccacggaagtgagcgaggaagaatacttcacgttcacgaccgaggagtcggagaaactggaagtacaacggattgccggaggaccggagggcagtctggaaggagccatccgccgtctggcggagaaaaagcgagaggaacagaaacaggtatcaaacccgaaatgaaaacgattatgagaaacagaccccttatgaggctggcggtatgtctgataagcatggccgccatgatattacagagctgttcggaaagcggtatcgaccgcgacaagatctgcggaacgtggaccagcgtggaaggcagacctgacgtgctggtatacaaggaaggagaatgctataaggtgacggtgttttcccgtagcgggagaacccgaaggctgaagccgcagacttacctgctggtggaagaaaacggaaacctgtttgtcaatacgggctaccgtgtcgatgtgtcctacaatgaggcagtcgacgtgctgacattctcaccgggcggagactatgtaaggaaggaggaacgggcatgaaggcaagaacgcttctgatcggaacggcatttgtactgggcgttaccggagcacgcgcccaatgggtggtgacagatcccggcaatctggcccaaagcatcataaacatgtcggacaatatcgcccatacctcaaagacggcagtcaatacggcagaaagctttgccgagacagtaaagatctatgagcaggccaagaaatattacgaccagctgaaatcggtcaacaacctgatacaggatgcccgcaaggtgcgtgacatcatcctgatggtgggcgacgtgtccgacatctatgtaaccaacttcggcaagatgatgaacgatgaaaacttctcaccgcgcgaactggacgccatcgccttcggttacacccgcctgctggaagagagcaacggcgtgttgcaggatctgaaacaggttatcaatgtcagtaccctgtccatgaccgacaaggaccgtatggacgtggtggacaactgctattacgagatgcgccgttaccgcaaccttgtgagctattatacgaacaagaacatagccgtaagctacctcagggccagaaagaagaacgacctggaacgtgtgatgcggctctatgggaatgaaacctccaaatactggtagccatgatgccgttgtcgatagattttgccaacctgcacaccatactggcaaccctgtatgacgagatgcttcccctttgcgaggacatgatggacgtgggcaagggacttgccggactgggtgcgttgttctacgttgccgtccgtgtatggcagtcgatggcacgtgccgaaccgatagatgtttatcccctgctgcgtccctttgccataggcatctgcatcctgctctttcccacgctggtgctcggcacgctgaacaatattctcagtcccatcgtgcagggcacacacaagatgctcgaaggacagacgatggatatggaacagtaccggatccaaaaggaggaactggaaaaggaggccatgctccgcaatcccgaaacagcatatctggtaagtgacgaggagtttgaccgtcagctggatgaactgggctggtcaaccatagataccgcctcccggctgggcatgtatgtggaagtcgggatgtataatctggaaaagaaaatccgggatgcattccgcagcctgctggagctgatattcgcagcggcatcgctgctgatagacaccgtgaggacttttttcctggtcgtactctcgatactgggaccggtagcgttcgccttcagtgtatgggacggattccagtccacgctcggacagtggttcacgagatatatttccgtttacctgtggcttccggtcagcgacctgttcagcaccctgcttgccaagcttcaggtactgatgcttcagaatgacattcaggaactgcagaacaatccggactactcgatagacaactcgaacagtgtctacatcatctttatgctgatcgggattatcggatacttcaccgtgcctacggtagcaggctggatagtgcaggcaggcggtgccggaaacttcagccgtaacctgaaccgtacagccaccaagacaggggggcttgcagccggagcaggcggtgccgtattggggaatatcggaggcaggctgaggggcaaataaaccctgcggagcctccttcccatgagtcgggcaacccaagatgacgggtccggtgacttgtcggaacgggatgtcccgtcataccggaaatatttattcattcaaaccagacatcaaaaaaatggaattcaagtcattgacaaacattgagagcagcttcaagcgcatccgcctgctgctggcggtctttgcctgctgctgtgcgctcgttaccggatatgcgctgtggagctcataccgctttgccgagaagcaacgcgagaaaatctatgtgcttgacgggggcaaatcgctgatgatggccctttcgcaggacctctcacagaacaggcctgccgaggcgcgggaacatgtaaggcgctttcacgaactgtttttctcgctctcaccccagaaggatgccatcgagcacaatatcaaccgtgccctgcaactggcagacaagagtgcctatcactactatgtggattttgccgaaagagggtattacaaccgcctgatttcaggcaacatcaaccaggtggtgcatgtggacagcgtggtgtgcgactttgccgcctacccttacaaggtgcggacatacgcccggcagctgattatccgtgaaagcaacgtgaccgagcgcagcctcgtaacttcctgctcgcttcaaaacacaggacgttcggatgacaatcccaacggattcattatcgagcagtttaccgtgctggagaataaggacataagaagtgcggaacgatgaggggaaaacgcggattcttcggccatgcggacagccgggtacggctgttctgccggcggctgacaggaaagcagcgcatccttctggcaggcacggtctcgttcctgcttgctgcctcctgtctgtactcgattctctcctgtgtatcccgtttcggggagccgggccaaagaccggcaatgggacatatccgttccgtcgtgttccggtcggaaagaacaagaaacattcattcaaacatccataaacatgaaaatggactttcagaaaatcagggaacggctcggagtgtcaaatgacaagccgctgactcccgaagagaagcgccggcgcgcaaagtatattgtctatccgtttctctgcctgctgtgcatggggttcctcctgctggtattcagtccgtcggaaaaggagaaggcggaaatggaaaaaggcaagggtttcaacgtggagatgccttcaccggaagattcggaaatggagggcaacaaggtaagcgcctatgagcaggaagcactggcaaaaaaggaaaaatggcgcaggggaaccttccaggagatgtccgaactgctcaacaagggcggtcaggatactgccggtcttactgcaggaaaagcaaacatggaacttccgccggaaccggaaaaggggaaagcccccggctccatccgttcctctgcagaagcctaccggaatatgaaccgttcgctgggcactgtatatacccggaatgaaaatcagccagatgccgatctgctccgccgtattgaggatctggaaaaagaaaggaagccggcggaagaacaggcggaaggccagaccctggaagaaaagatggctctgctggaaaagtcctacgagctggctgcccgctacaacgggaaagagcctgatgcttcctctacggccaatgccccaaacagccggaaagaacggacggctgtccggcctgtaaaacgggtacagaaccggatggtgtcatcactcgcccagcctgcaggcaatgaagacattgcttccggatatgcaggcgagagaaataccggcttccacaccccggtaggcaaaatgccatcttccggcaggaacaccatcgccgcctgtgtgcatggcacgcagaccgtatctgacggacaggcactgcgtatccgcctgcttgagccgatggcagtggacgatctccttatccccaaaggtacggtactggtcggcggtacacgtgtcgagggggaacggatgggaatcctgatcgagacagtggagtacaggggcacgctgtttccggtggaactcgaagtgtatgacgctgacgggcagcagggaatccttgtaccgaactcgatggagtatgatgccgcacgtgagattgccgccggcatgggcacctctataggaagcagcatcaatatctcaacggatgccggagcgcagattgcctcggatgtgggcaagggggtgatacagggtatgtcacaatatgtgggcaagaagatgcgcacggtgaaaatcaccctgaaggccggacaccggctgttgctgcattctcctgaaaaatgaaggaggaaaggaaatcaaccatttattcaccaatcaaccaagaaacacacatgaagaagattctgatgatgcttgccctgattgcgggcacagtggctgcatacgcgcagcagagcagcggggattattatgaaggactgagccgcaagatcggattcagccggatgattcccccacacggtctggaaatcacatatgacaagaccgtacatattatttttccctctcccgtgagatatgtggacctgggttcgcccaatctgatagcgggcaaggcggacggtgcggaaaatgtgatccgtgtgaaggcaacccggaaacatttccggagtgagacaaacatgagcgtaattaccgaagacggcaacttctatacattcaacgtcaagtatgccgacgagcctttgctgctgaatgtggaaatgtgcgacttcatccatgacggagaggccgtgaaccgtccgaacaatgcgatggaaatctacttgcaggaactcgccggggagtctccccgtctggtacggctgatcatgaaatccgtgtatgaacagaacaaacgcaaggtcaagcacatcggctgcaaacggttcggagtgcaatatctgcttaaaggactttatgcgcacggcgaactgatctatttccataccgaagtgaagaacgccacgaacgtgcctttcgacgtggacttcgtgaccttcaagatcgtggacaagaaaatcatgaaacgtaccgccatgcaggaacaggtcatctatccgcttcgtgccttcaactatgtgacccgtgtggacgggaagaagaacgagcggacggtgtttgccctgcccaagttcaccattcccgacgacaagaagctgatagtggaaatgtatgagaagcaaggcggccggcatcagtcctttgatgtagagaatgaggacctggtacgcgcagaaaccgtcaatgaactgaaagtcagatgaacgccatgaaaagaaactccctctttattaccctcctgcttgccctctttacggggcaggcagaagcccaacgccgcctgccgggaatgaaagccgtccgcttcaccactgaaatggccgacggattttacagccgggcaaaccgtcacgatgcaggctatgccttctcgctggctgtatccacctgtaccgggaacagaaaccagtggatgtttggcggtgagatgctgaaacgtaacatcccttaccggagtacgcatatacccttgtcgcaatatacgggggaaggcggttattaccatacgttcttttccacccccggcaagtccttcttcctgaacctcggcgcttccgccctgttgggctatgagaccgtgaacgaaggagaccggctgctggatgacggagccgttttgcagcaatgcgagtctttcatctatggcggcgcggtaacgctggaagcggaaggatacctgtccgacagggttgtcctgctggtgcgtctgcgtgagcgtttcgtgtggggcagcgcctcgggaatctgccacttccagtatggaatcggagtaaaatacattttctaaccttaaaagaatacatacccatgaaaagaaaaatccttgattttatgctgacagcctgctgtatggcattctcctttcttggtcttgtcgcttgtgacaatgagctggatatcaaacaggaatacccgtttgcggtagaagccatgccggtagcggatgagattaccgatggggagactgtggaaatccggctggaaatcaagccggaagggaactttaccggaaccgtctatacgctaaggtatttccagccggatggtaagggcagtctgaagatggaggacggaacggtactgaagcccaatgaccgttatctgctgaacgaatggaaattccgtctttactatacttcgcaaagcggcaaggaatcccagaccatagacctctatcttgaagataattgggggaatctgcaacaattgacatatgattttaatggaaaggatacggatgaagaaaataacaaggaggctgcatgaaaagaataccggctgttatgatctttctgttacttgtcttgtacggcaaggcggaaaatcccccgtctgacaaagataaggcggtagcctgcatcaagcggtgggaaggctggcaccgggggaaaatgccttacatcggttacggacaccgcctgcttccccacgagacgctgaccgagaacctgagtgaggcacaggcggactcacttttgagatgcgaccttgaacggtgtttgaaggtattccgaaaatatgggaaagattcgctccttttaagtctgttaggctttaatgtaggctgttaccgtctgatcggcaacggcaagatacctaaaagcaaactgattcagaaactggacagcggcaaccgggatatttacaaggaatatgtatcgttccgctgttatcgggggaaagtcattccaagcatagagagaagaagaaaagaggagtttgaactgttctatataccgtagattgcttgttgataaaggtttggttgttacgagacgaccgaatcttttttatttgtccggtatgaacatatccctaacaggtgttgtattttaatgtaaccgaaagacataaaatgtgttattgagcatatggtgcataaaaaatgctctttgaacattgtctttcttgattttttgctaagtttgagatgtaatgtcaaatgcataaaacaagtcgtcatgaattcagaaataatattggaaataaatggctacaaatgcaatctactaaagtataaatactgtttttcccgtaatatagaccgtaaaggaagacctgtaacaggaatgttaggaggaaacatatatatagaaatggaatctaatggcagcaattgtattttggatatgatgcttgttgatacggatcggcagcgttccgctttcttttctcatgcagaaccttttccggtttgggggaagatactgcatagcatagacgatatgatgtttcgtgaacttttacttcgtatcgttatatcattgaaaagtttacggatacaaaaaacgcctaagctatcacctaattgtggcaatttgcgatgaaacctttctgaaagtaagtgtaaccgcaaagaatgcttttcttcgtctttatactcgaattgcttttcaaacataatctgattgttctgttctcctttgacaatgatagtggcttccttaccattgtgggcttgtacttcaattgaaattattgttctgttcatacttacaaattttctttattctatatataaaactttgggaaagatatatgagtgacattttgtcagaatagagatataggcatacctcttgtacatataaaagtgtcccctaatattcgtagtatcaggaggaaaaggattcgtttaacactgtaaaattgaacaaaatatggtataaatattggattgaatttaccccatagggaataagacaaaagcttatttggttagagaagtgattggtaataaacttgctcttaccgcacccgattatactcgtttatacttgggtatgtctgaagttgaaaagataacggactgtaatgtgttatttaaactgggaaaaatagatttttaaatattggaatatgaaagaagaaagatttattgaagaagattttgaaggttttctggaggacttgataaagtctggtcgtttagatgacaaagaagctggtatagctaaaaggatgttggacaaaggatatgacaatttatctgataaacaaaagtatgtctttaataagatgattaggaataacagcgttgaggaatgtcaaagatgtgcttgtgatattccttggtctgaaatgcttgaagctcttgataatggcggttattgtaactactgtcagcatatgatggagaaactggaaaacgagtaagaaaataacgggaatagctatcaaggttattcccgttaatgtttaatcagttattataaatcagacaagcctatttagggtattgtcgtaaatactcacctcatataaataataaataaggacatttttcccaaccatattatgattatatgaacgaaaaccataaagacacattacatattgaaagtattcagcaactaaaaaaacaagaatcctgatttagttgatgcttttctggaaggagatagtcttttatttagagtgcactataatcaaaatttaattccatatacttaccctgttcaagttaaataacgagcaaatagctgcttggataaaatgacttgaatagtcaaattagatacatttacaaagcgggcagagtcataaaatgggaaagggctaaaaacagaaacgccacaggtatgatgtgatatacatcaccttgtgacgtttctgtttttttaagatgtatttgtctgctattcttacttttgaagcaagtattcccctattgaaagataccggtctttgattgtggcattttcattgaatccattcagacaatggagcaaggctttctccaaagtggtgtatctgcggttaaaacattgcggattgtccaggcaataggcattcaaggcatatctgtatggggcatattcaggattatcctcttttgtgattttcacatgccaaggaaagtgtatccgcagagtgaatgaccgtgtttccccttttgtaatccgttcctcttcctccagcatttttttcacgagggacctgtccagcaacggatatccatattccctgtaatgtttgatatggcagcaatactccgttgcgtattgcttcaattcttccggtcttataccatagtgcttcccatagaaaagcagcacttccctgcctgttacgataacgggctttccgtccgcttcatgtttaaatacctgccgttccatcttttccctgtctgtcagcaaggcaaaaccgaaacattccgtaagggtgaaactttccctgccgggaacggacagcccaataaggctttccaatgtgtggcagtaaaagaaaataccgtcatcggccataccggtgtccggtgaaagcataattcttacatccttgacctgaccgctgtccctttggacaatccggcaatttgcgtaatgtggctcacaagcattctctttcttgaacctgtggtatttctccaaaatttcgttccggatttcctccttgtcggtcagggcaactcccaatccgcagttttcgcaccacccgtaataaaaagcttcgtccgtgaagtggtcgaactcttttgtgttggggtttaccattgcctcacacctgacattggccgatccgcatctgctgcacactatattattttccattgttcttctgctttacgggcgactcacggccgcccttgtcatacaattcggttgttattctcttaatttatctttacccggttcatcagctgtcccgaaatttcatgcagttcccggcagcgttctggctgctgttcccttgcaaaggcggtgattccctgtgtcagtttccatagcgtggccccgcctgtaactccgtcgtcaggattgttgttcatcagcagtttctcgacctcacgtccctcgtttttcaacaaggctcctttctgcaccagattcttcagttccttgtcgaaatccacgtctatctccgatgctccttgaatttcgatggccttctgcatgatggtgtctttgctgtacagtcctttggtcaggtcggaaacagccgatacggtggtctgcgtgtccagttcgtaggtcttttgggagagggacagggattccggcagtcggcctccaaggtgtatctgccgcatgacggactccctgaccatcccgttcaggcacgccccgttgagcaggaacgaccgcatatcgaccgatccgttgccatagtcggatgtggagaagcgtgctcctgcgaagatgatgaccgttccgttcttacgggtgggtatctctatcggagtgggcaggattgtttcacaccatactttcgtgtcgttcatataggcatcggacacgaccgctccctgtcctcccgcctcacggatgaaagcggtcagtatatccaccgagttcagccgacggtaggagtccgacaatacgccccggacttccattcctaccgcccgtatcagtacccgtgtacgctcggtccatcccgaatgctcgttcaggatggtggcgcacaactgtttctgccaaacatccccggcggaaagctcgcgcaggtatttggcgggaatgcccatcttctccgaaatctggcttatggcgttgccgtgcaggttgaagttcccttcgggcattgccatctgtacccttccttccgctttgaaagagataacggggcgttccttgctacgttggcttaccccgatgggagcgatgaaatcctgcgcgatccgtccctcactgagcagacggttaatggtgtccatgacaccaccttgcctgccttctatcatccgctgtaccttgttaatgactacctggttgaggccctgctgcttctgtaccgatgcagctgccggcattactgttgtttccataatactatgtttttaatgttgatgaatcagaatttattcttagagcttgtcttggttgttttagcatgtcccatgtatttttcttctgacaaacggatataatcctcttcgctatatccggtcagcccgaacagttcataatatccggggaaagtttttttccccgcttccggtatatgcatgctggttcccttgtggcagcagatgatatgccggacaaagcggtaacacttgcaaagatcagccacgacggtatattcgttgtccgtatgaggttcgtaatatccacaggaaagattgatacaggatacttccagaccgttccttttcaaagccgccacatctgtattcagtccctgtgccggcttgtagccgtacttccggacatctatagctgaaatgaactcgttggagcagagcttcatcccattgatttgtgttaccatatccccgttccctttccggtcacactgaatcacgaaacggcaatcggaaaagaaggacatatcggcatggctgctgcctatgcatcccacctcctcctgtacgaagaaggcacatttcaccgtcttgcaatcctccaggcatttcaggcagatccagatgccgttcttgtcatccgcaccgattccggtcatccgtttacgcttgtgatcatagccgacaatcatcgagtccgccacaagatgggctgcataagagcctgtcttgcgccggtgtacctcatccatgtgcgccacgacacaggggtagctttcccggttgcctttgaccgcatagatgtttccgtacctgtcttgccggaaaggaatctccatccttttgagttcctctatgatgaatttagccatcttcccctctctgccagagggggaagaaatgccgtaaagagccattagtttttccatgataatgatattttaggaaatgaacaatttttcgatttgcaggtatcgtctgaattccggtacgggacgccctttacgaaagagaaaagacggatatttctttcctttatattccactgataatcctttcaggactttcccgaatacggtagatacatagtacatatcctgacagttcttgcagaatgccgcatccgggaagatatgtatcttcccgcatttgggacatacatattttttcctgtttgcacacccttccgtgctccggcaggtggctatgctcgtgtcgccctccgtatttctcagttccaggttaccgtccgtcagatgaaggctgtagaacgtgtcgaggtaaggcacccctttcttgtgccacctgcaggcgggcactttcaccgtcaaagagacctgtatattatctccggccgcccattcctgcccctcaatgggattcagtacggtgaaatccgtcgtatgtgtataatcgttgtatctgcgtcgcaacaggatgcctgcctcctgcgcctgcttgcggatcagttcgacgacgaatgcgtgtgaggaatagatacgatccagcagggaggcggcaatcggtgtgtttattgatttccacaatgttatctcgttccatacaatggcccgtccgaccacattgctgctgtcatcccttgccacgagtattttggctcctgcgaaattggcatagaaatccgctgcattacgggccttgtcttcatatctcatacaggagttgtgcaggctggattcgctaccgtcagatatgggactatagttgctttccagataagcctccataaaatcgttcatactgtcatgcagtctgattgtgaccttgctgtccagtgagatggcgctgcagaaatagttgatttcatcgggctggtacggtcccagatttttgaacagctcgataaacgtggacggttccagatctgtccggttctccggaaaccagggtgcctgcggattgttccggtccgggaaattgggatggcccaagtctttgttgcatgccgtgaacacgatccggattttcttgaacgtgccggcttccgtccgtttgcgtttggtggagaaaaaattgtaggacccccgtatgacttcttccaccggtacattcttttttacttccgaaaggatatctttggctatcacacttccgttttccgccgcatgggtcaggcgggatttcaattcgttgctaacattcagtttcataatcattcggtttattgtttataaattctgttgtttatatggcaattgtttcttgccaggctgcatttggcgcaatttctctttccgctttctgagcaggtcaacggacatgttcctgcttgtccgatattcctcctcactcatccggcgaatggagggaatgcccgtccgggtcagcgtatggtttaccatccagccgtccatgaagttttcggggcagaggctgtcatggtggatgacctcacctatgcagccatgtacgagcatgttgcaaacggtcatcaggcaacaggtacggctgacatcctctgcaaccagataattacccaggtggcgtacatgatatgccagcagcagccttccgcttccgcatgtcgggtcacagatacgttttcctgtcgctgtctcccccgaatcggtacataagaccatcaggtcgcagatatccggcggagtgaagaactgtccgttcacctgccgaccgcttttggaggatattgccatgaagaggtcaccgaacgcatcaaaccatccgccggattgcaattcccgctgcatgagccgtatccatccggtaagcatttccataaaatgcctgttctgctgccgtttgtatttccagtccataaggggcggtgcgccgggagagaacccgtgaatgacatagcgcaggaaatcgttgaaaacggatatcggatcgtagccgttcgaataggcgaaatcacagaccattttctcaagcggacgtatcgcctgcggtgtgttgtatggtaccatattactctgattttttatagattgttactatatgtcttttatggtcagtctgtatcctgacgggagaaatgccaaggaaagagagatgggtgtccgctttcagcatgttccattcccatgcgggaagttccttccattccatacggtatgcccagagtatgaacagaccgggacggaatccgttgaaaagctttccgtgcagaatcccgaccagccgttccagttcttcccgcgagtaaagggtgaatgcctcattccgatagacaaaggcatcagccggttcaatatccggctgacactcgatgaggtatctcttccattcttttgtggtgtactttccgtacagaggatcgggttccgtgtatttccatgccctgacgaatgtgtggaagaggacggcaccgttcctgtgccttccggtatgcccccacatccggaactgtttgctgcgtatgccatcgggaatcagcaattccggaccggttgtaacccaagggcctccttcggtattgtaaccggtacacttttcattttcatggcaaaaaggtgtctgtgggagaaggcagatatgaacttcccggtcatcgcccctttcaatgtgtgcctgcggataatagtcaccgccacgggtgatataagtgacaacgtctcctgcagtcggtaaaccggctctttccctgtcctcccgcatccttgaaatcagccggttcaccttctccacatcacattcctttatggagcaggcacacccttcatgcctgttgagcagagtcagactttccaggtcataaaaattaccgtacttcatattgagatcgtttttgttgatacaatttgacctgacgggcaaccatgtcgcagaacttctgtccgttctccttctcgcttctgaaataggcaatcatgtcccagagattccgattgaagtagccggtccatttttcgtaatagtgacctccatagacctttccgaacgtttcctcgaaaagtgcaggagtcagcccttcatccccgtggtggttgtattgccacagggagacaagcagcagctggttataatccagtgtttccatatctgttcttttttaagtaaaacatcggcctacatgggtaggcatttttatttcttgatgtctttcctgtctgttttccggggattgcggcaaggcttggcgaaagaaaataccgcagcgaagcgaggatgattttctttcagccaacccagcccctgaaaggggccgccttgcacaatcagcccggaaaacggctatctttacagcaagaaatgaaaaagcagacctcggattctctgttctgaagtctgcttttcggtcattgtcaagtttcatgtttttcaggtatgtatctgccatccgtggaacggctgcaatgttacggcaaacgacctgtcaggtattccatgatagagcagacctcccacgatacctgtccttccgtcgggatagtgctgtgtgaagccgaacgagtacggggcatggtcatagtagagtgagatttcgcagggataatcaggattcccttcccaactcttcaaccgttccaagcacttttgaagtgaggtgtcaccgatggattcggcatagcgctttacgttctcgaaatgttcttcattcaggattttcataacttttgtatttttatcagttaaacacgtccggctccgggagccggtatttttatttctcgcctgcctgacagtcccgtggccgtacccgcaaggtttggcgaaagaaaataccgcagcgaagcgaggatgattttctttcagccaaccccgcaggggcctgaccttgtacgggtacacaggacacgggactacctttgcagggtgggaaataaaatatacggttgttttttgttgtgggattttgtgtggattccttagataatcttcctgatttgttcgccattgccggacaaatgctgtatttttgcaatttctaatttcaggattatggaaaactatgtaaagaaagcggcggatgctttccttgtggagcgtccgtacggtatgcgtgtggattacaggaagaaaggattcgtgctgtttaaccgtaacctcaatgtgttgggaaatgcggaacagacccgtctggaagaactacctctggagcggttcaatgtggaggagattccgttggagggtgaagtcgtggaggaacacgcgggatttaccgatgtattcttctataccgatctgaccaatccctatgccggatatgtactgaatttgcaaaagcttaaagcctataaccggttgatgtttccgctggcaatggcgctgaaccgtgaattgtgaggccggaagccggtagcggtaacagctgcatggagcagaccgttaccgccccggatttaattatttgccctctttttctgttatgaacgccagatagacggacacggccttatggcatccggtaaagtccggagtccggcagcccttgattttccggaaactgacggttccgttcctgtcaatgcccctcacatgcctgttgaatgtccctttggttctgatatggatgtcaaaaccgtcccttccggtgatttcaaggaacatttctcccgtgatccgttccccgtccaggaatttctgtttctgttcattgagcagccgctgatgttgctcttcctgcactttgcgctcttccgcctctttctccttctgctccctgcgtttctgctcctgtattcttttatattcctcacgggcttgcaccaagggggtggtgtcaagtccgagagcttcgaacacgcggacggagatcaaattgacgaaggctcctctttccgcactttgaagcgtatccgcaatccagttcctgcaataggtggcggcttcctctctgcaaccttctcccttgaggaaccggcgtgaatactgcccgctagagaaataaacgttttcaatccggcagaccacatggaaacagtcatcgtcttcattcccgtattcgttctttctcgacagggagagatatacattctccgcgtacggctccagttccatataaggagccacgacggtattcccatcagacttgtacttgaatacttttgctttcatactatcgttcagtttgtcggttgttgcatatttcatctataatctctttcccgcttctttcacccttcaggaaggcaaggaagcgcctcaaaaagagccgggcacagtcagttcccagctggaagctttcaccgtctttggtagcacatacagcaaaacgccccagtccgaaactgtcctgttgtggtacgatgtggtaagacaagtcctcgcttgcgttgatgtgcaacccacgacggaaaacatagaaagttttcgggattcttctgtcggtatcgatttccatacgcttgtaaccgtgatgttccaataatcggcccagttccctgtttgtcggaattgtatgtccgatccagtccggccagcttatattttctattgtgtgtccgtaattgtcatataatatgttgaactgttcctggtattcatcgtaaaattccccgttcccgttgcacatttcctccaacgcgatgccgtttttacggacaagggcaaggtcgcccagtccgcacgcgatttcattgagcagcgtgcgttcctcatccctgttctttgccgttccgtaaattctaagccgggaatatcggtgtagcgccgaacgggacggcatatccagtttttcccatattccatcgtttcctatagcctgtctggtgtttcccggaagtccgtaccaccacttgtccaaattgtttgtatccataatttctgaatcagattgttttcaaattctgttttgagtaccatgcctgatacgcggcggcatactcctgacgttcccgttccagggaatttctcatttcaggggtgtacccgagcaggcggatgtatcctccgttatagccggtgggttcgcactttattccggcttcctccagtttgtcgatgcgtttttgggccatttttgcgcttgaatattccttcggccaaaaatagacttcgccccgtgagccgaaacagtcttcccccagaattatttccccggcatacttccggctttcgatgatgccgaaacgcgctttgcccaatgcctggcgcattgccttgtgtgccggaccttccggatgcttgaatacctccggcttgtctttgctgccgagtttgggcggttccaccttgtacggctgtttgtaacttccgattccgagcgtcaggtaaaagttggtatgaaaatagtccgtcatgggggcgctgtcatcgaaattgtacgacatgacgaaatcgcagatattcatcattacatcctttgccctgtccgtcaatgatttgtctgaatggatatgatggtggttgacatcgccttgaacttttccggactctttggtgaacgcctcgaaatccgctttcatcaaccggatatggatggagtggtaattctcccgtctggcagagaacttgtatcccggataggtctccttgagccatgcccgtaccagtcccacgatttccggagcgtgctgccccttgtaattgcggcctttccagcggtattcgttatacacatacccggtgtattcctttgccgtggctcccggatagtcatattcatatccggttgaggtcgagggaatatccggtttttctttccaagcctcaaaaagccttccaaactcggtggtcacctgttgcatgattgcggtgtcaccacccttgtccgggtggtgctccaatgccagccggcggtattctttcttcaagtccgccagagagtgtatgttctgaaaataagtcatagccataagttttttatgcccctgcgaggcggttgataaaatattcccggtagtcaagctcaaaaccgaggttgagacaggccgtttccatgtcatcttctctcaggtcgtccgcctcctgcaattcgcgcaggtaccgtatttcggagtccaggtattcctgtgcttccgtttgaccgcaaccgcatgagttgcagatcagactgataatgtttccctgcatgctgtttgattttttatgtttctgttcctgtttctgaggcctcgtccgtcatatatcgagacggcccgttccaccagaatcctgcggttgtcttccgagagttccaggtagaaccgttccgccgcgccgaatgtgcccttgtctgtcgccacgcaccatttttcccagaaatgcgggtacatgccgccatacacggctttgcattcctcctcgctccaggcgttccacatgtagtagaagaaactggagacggtattttccgcttgatatttcatggttcttctatttgtgattctacattgtttgtttctctcagttgatgccacacagcctcatacatctcatgaagccagtctatgttctttgcgccgagttcaaacgggctgtgacactgcacctcgtcaccgctttctttctcttcggcaaggacggtcaggctgtccgccgttacccggagtcctgtcaccctgcattcatatggttctccgttcttgccaaaccatatcacccagaccggatcataatcctcttccggaagacgaatttctttcatgcagtgagcatggagcaactgccgtatcgcgtcgatgatgtccccccgcagttccttgatcctgccgctgaaatcaacggcttctgacggtaaacttccttttccgcctctttcctgcaaggagagaatccgcgtgtcgggatggatacagaaatcccactccaacacttcatcgtcatcgcgtgtcgtgtggatatcgccgcccaaaacaagaccgcaatcgtcatttaccattctttttgcttcatcgcggtcttctgccgctaccgtgtaagtgccctcgaaggaataccttactcttatgtcatatcttttcatgattctttccatttgattgttgataccagattcattgcccggaaggattaccggatattcaatattgcgctaaagacatgtgggtcaagcctgtaaaacgtcggaaggttaagtgtgaccatcgggtagcttacccagccgctctgacgtttatagcctgtatcctcagccaatttgttggacagaaggaactccatggcatcaggattgttgttgatgtccacgaatgccctgtcaggcagtgagaatgccgccttatcttccaggttaaccgtcaggaccgtgtatatctcatgggtcacgggatctttcagagacaatgccggccagccgttatggtatatttcaatcacgattgagagacggctttcctgatacaggaaagtctcttccatggacggatggtcgcatttgataatttcaaaatcatcctcccctttggtaaatgtcaccatcggataggatacatcgacaaaacattcctcttcccggtaacagagatgttcttttccctctgaacggattatagccaatcgggtgttcatattcgtaactggttttaaaattattgacttgcaagttaattggtcggaattcacctgcttgtttctttaaacgtgtgattgtcaccgcctgcggacatttgggagagttgctgtctcaccgccttgattttcccgatcagttcgtcctcccttcggaatgagggggtacatttggtacgcctcatcccggctccccaggggatgccgccgcatacttttctcaggcgtgccttttcgctttccaaggccgactccagacgggccaacctgcgtcgcaacgattcttcggtcacagttctcatgatctcattgtttttttagtatggtgacggatcggaaagacagtcaccataccgtcgttatgtgtcacgttatattttagctttttcccttttgatgcctctcaggacgtacaacaggtgtaggaacagctccctgtcgtaaatccggaagaagaacggctcgcctgtttccctgaccgttccggtaaacgacacggactcccggttcacgggatattggaagaagttgccgtttgccagcagggtgtgctttttcttcatcacttcgcctaggaacctgtccatatcgtcgtttccctcatagccggagaagtagaggaaatgatgacggcgcaggcttcgcaggattttggcggtttccagcctcacatccctgcctgacgattcgtccgttcctctcatcaggttgcagatgaactttttctcgccatttatgtcaagaaacagataaggaactataattatagaggcatgccgtgcgtggccggagatgaccatcggcttttctttctggatgtctcctttgaaggtaatgttccggtaatggttgtccatctgccgttccagctccttccttggcgtggtaacggagcggagtcccgtgaagtagcgtccgcccgcccggaaacagaaccggtagatgtccgcatgataaggctctcccaggaaaaagaaattccgggtatggcggatggggggcaagacatccatgtagtcgaaatatctttcttccgtaatctcactgaacggggcgcagagggattgcaggtggatgcgtatcattttgcggacggtatttccggacacggctgtgagacacgggttcttttccctgtctctcagttcctccagtgtctcatggtggtagtcgccgtgtattccgtcagacatggtggtcacgcagctgccgtcaaaactgcgtgaatcgactacgaatttcagtttgtcgttattcatggttcagatgttttgaaggttcaacactcttttggcggcactgagggcattggaggtgagctgccgttgccatgccttgtttttgggtgaccagcggaatccggaggatttcagttcctttcgtctgctgtcttcaggaatcctgtcaaacaggatctgaaggcggtcttccccatagttccatacaagtgtcccgccctcgaacggcacttccttgttttcccggctttgcatcgctttcagcttttcgcgcatccgttccgccagttccggcaattggaagaatttgtttctcggtgtgatgacgggtttcttcacccttgcgttatattcggaaatgaagtccacggccctacggacgatttccacttccccgtgattggccaaagtggataccttgttcaggatgctgctgacaaacagggcacggctatagccccggcattgtccggtatcaatcccgtggatggtatcggcactgctcttgatgtcgcgtttgagcgtctgccatgccttttcctgtttctcttcctccggtcgtgcggcttcctttttccgtctgacggtttcaagaacttttttccgccaattgcggaattcttcgtaacggttctgatagcttctgttcgttttttcctgcctgtagtaatcaaatccgctccgtcccgtcaccatcgggttggcacagcgggagaggaccgagagctgggcggacaacttctgccggtaggcggcgatgtatgtatcccgttcctcttccggcatgagttgcaggtcgttgtgcagcccctctccgtaaatcatgatgtccgtctcgccgcgaatctccggattgaaggaactccaggcgtatgcgtcgcaagcctgtttccacatatcatccaaataggcaggatgtttgaatgctacggcttcccagtctttgaagtccttggaatgcaattcattgtgatcttccggatttccgtacaggtgtacatagttgcccgttccatgatgctcctttctgaaatggaacggtacggggggatagtccgtaccttttttccggatcatcgtgaccctgtgtgcattctctatggtaaggtctgctacttgctcttcgcagacctttgctgttgtttcattcataatcattacttttttaaatgtcagccgtaaatcatttcttccagttcatcgtccgtcaacaggcggatctcttcgtccgaacaatagtaagcgatttcttcgtccaaatcgaatgctgtcggatcaaggcttctgatgccatccagcagttcctgttccagtctttctacggaaaccagatagttcccatctttgccttgcacttcccgtgcaggatagctcatttcccgataaaccaacatcgtcatttccggattggcttcctgctgtcctttgcttgtcgtctttctgttcatacctttatttttttaagtttgacatgatcggctccatggagccggattttcgttttcttacttgcctggctgtcttttgtcggggattgagcaaggcttggcaaaagaaaataccgcagcgaagcgaggatgattttcttttagccaaccagcccctgaaaggggccgccttgcgcaatcaacccgacaaatggctatatttgcaggtaagaaattgaaaggacggcaggatattgtgaattatagattacaaaaaaagccatccctagggggacggcttaatgactgaatttgtatacttattgtgcaagacgctccttcacgttgttcattgcttctttcaggctgctgttcatgacccgtgcataatgctgtgtcatacgtgtggaggcatggccgagcatgacggaaacatcttgaagaggcacattgttggcaagcgtgaccgtagtcccgaaagtgtgacgggcaacgtgcgtggtcagattcttcttaatgccgcagaaatcggctatttccttgagatagctgttcatcttctggttgcacatgacgggcaaacagcatcctttcttaatgcaggtcggatgttccttgtatttctccaatatggccaggggtacgggcagcaatggaatattgctgatggaagaagccttcctacggtgttccaatttgacccttccttttcttatccaccagtctccgagattgtcctgtaccagattctctttgttcagactggcaacatcggagaatgccagaccggtgaaacacgcgaagacaaagacatccctgaccagttcaagccgtggaatggtgaatttctttttcattacggtctgcaactcgtcataggtcaggaataccggatcggtctcgtcctgctccatcttgtaaccgtaaaagggattcttgcgcatccattcctttgccaatgccatattggtaaatttcttgaagcatttcatataacggactatcgtgttccggcacagtcccgcctccgttttcaggtagatgtcaaacgcacggatgaactccggtgtcagctcatggaaagtgacatcctcctttccgtaataagaggggatgagcagctgtaatttcttcaccacgttcttataccggttgatcgtgacgggagagtagtctatacccgccagtatttccatttccttgatgccttccctcatggtgccgagcagtgtacgcatttcggtgtctttcccgaaaacacgtttaagaatcagttttggggtaatcagggcctgttccaataccagttccttgtgtttttccaaggcgcgtgcgtgcagttcggcaatataggcgttcagtgccactgatgccctgtccctgcctttactgcatcctttggcggcgttccataagttcaggggtacgcttctttggatacgtacatcgtcatagtctccattgatggttatccgcatcaataccggtgcctcaccgtttttcaacaatttcgttttaagcacgaaaaacagaatgttcattgttccttgtttcatcacttttgttttttgaggtgttacattcaattgtttcgtcaaaaccggatggcatgaggacgtggagcgaaatgttaaattcggtggtttttttgagggacttgtggaaaagccataaaaatcccatttttctcaggttcgaattgccttttgtatcccgggttcgattccttttttttatcccgatgggaaataccgaatttttaaatttctttcactttttcgacttcatccggtcatgtgtgcaaaattactttttcacaccggagattggaattgtcaaacagctgaaaaacaatgaagtatggtgcgtatttatggctttttcaaaagccttaaaaaaagccactgaattggcgaaatccaacttcacaaatatgtagcggaatgcgtagtgagggtaaaaaaagaacccttgaactatctctaattcaagggttttcatgtgtgaaaagcatttatgtactttctttggtggtgccaccaggaatcgaaccggggacacaaggattttcagtcctttgctctaccaactgagctatggcaccgttgttttgtttaacgagtgcaaaggtaaacattatttattacactccaaatgtttcaatggaaaatattcaaagaaaatgtatttcaaggaagatacagaaaaaagtatattttttttcgaaaaaaaacagcaaaactatttgcagtttaaaaattagttgtacctttgcagccgtaatcaaaaacgggatgtagcacagttggctagcgcgccacgttcgggacgtggaggtcggaagttcgagtcttctcatcccgactacaaaaacgaggatatatcaaatgatatatcctcgttttttattcatacgaacaaaatatgtacttttatcctctcatttttataaaaacagacagcatatgagaattacacacccccgtttggcaaacgctcttcatgaaagtacaaatatacagacagtgttagaaaagaacgatgaggacctaatcgagtattcctttaaaagcttgcgtatagaaggaataaagaaaagtaacctttcagtgcagtcttgtgttttctccaattgcagcttcggaacatgctgtatacagaaatcccaatttagcgatgtcgtgtttaaaaattgcgatctgtcgaatgtaaacctaacaggttgtggatttcaccgggtagaatttatcggttgcaaattaatgggaaccaatatgtcggacgggatattcaatcatatcacttttgaagagtgccggggagaatacatgaatctatcaatgagtaaaatgcgatatatacaaattacccgatccaacctgcagggagccggaatagaagactgccaattgacgaatgtctcattcgatgcctgtaacctgatggaagcggagttttaccatacatccttgaaaggaatcgacctgtcgaactcggaaatatccggtatccgcatcacaaatcttgccaacagcgagctgagaggatcttccgtttcctctttacaagcgttggagctgatacggatactgggaatagagatcaaagactgaacgccttcatccggcatagtcgggatggcgatgcaaccaagtgaccgcatagctacaggttgccgacggcttcatactattctcgatcgcgtaatcataagcgtattttactaaagcggcagcaatccctctccctccgatagcgggcggaacaatcgtgtggataatatccagtttatccccagataaacgatactgtacaaaagctaccacgccatccacctgtgtttcaaaacgtttcttatccggataatgagttataatgtaatccatattcttaattatttataggttcaaattccaataataaaacatcctttccttccccttctggaatgttttttcctgaaacgttcttttttccccggaagaagttcttcacttttgtaagaaaagtcataatttctttggctgtatcctgcttctttttggacataccgaccgattcaatcaacggtggtcttaatatctgccacaaataattgaaagtggaatgataaggatcccttattattgaaacactcgaatgacgcggtttgttaaaaccttttcctgttttatccggattattctgttttaatacacggttgaccagaccggtcagaaacttcttatcggttagtacaccatctttttctttcagtaaagcagcttttaagccattatatagaaaaaccatctccactgtagctcctttgctggatgcttccgtactgaaagccatctctcgaacccatccactttgtacctccaccgaagccaggggaaccagcaattcattcaacgccgtaaggtcaaaactgtctaggcgggcattcagcaagaaacgatcattcagtgaatcgaccggtaacttccaagtagccgtaaagttccctttccccatcaacttgccatcagcatccagcacaatgtattggtcaggacgggagacgatatttgtaaaaccggtaaacgttccgttcatatccgtaaaaaacagttttccgggcaccgttcccttctttgccagctcttcgtaaacaacggaaaagttctttatgcccactctttggaaatccagcttaaccggagccttctgtaatccggtatagatcatcggaacaatacgccggggtatcggtattttctggttcttcaaattctgtaatactgcatccgatacctgtacatcagctatccgaagcaccttctccgataaataagtggacagatcgatacctgtcagcgcaacctgcccgacactcacatcaaaccaatctttatgatgcggctgcaaataagcaaactgcattttaggataaggagatataagatgaatacggtcaatgactacacttgatccggtcaaatccacagcacctacctttaacgtgtaaaaaccgttatccagaggaagctccaggttacgggtagagaaacgaatatcatccaatttatatgtacggagacgagtatcaacagccagcccctcaataaacaggttagtcgtatctaacttctgatgttgcaaagaatcgctcttcccataataggcataacggatgttcgcatccttcaagctaaagcgacctaaaaagattcgtccggcaactttctccaaagctgtatataaatcaaccgaacctaacttcgtttgattttgtagagtatcgagaaaatgaccggaataaatatccgccacaggactttccatgtgaaccgaacccaacttcaacaaagtgctatcccaggaaaccccttccaatgccaggcctttaagtgaagccgacatgccacttccgtccggtctgcgcacttggacatcaggcgaatctacccggaacgatgctacccgaatattccggtccagcctttcaggtatccgtttcagcccgcctatacgaagtcccggtgaagaaaaccggatatatgtctttgccttcttctccatcgtattttgtgggagcagtttgatatcctgtaattccagaattccttttacggtcgaaaattgccctttccgcacagacaaacgatattctttccccggcaaatagttatcgaaccggctaaaattaaatcccatatttccgtaatcgaaaaacagtccactccccttccccgtctgccggttcacccaaatgccggttgcaaagaaattaaagtcattcagtttataagtaaccggatcggacatgcttttatcatcgatcgtcacatatgcatgattcagactcaaccgtttaacagagaaataacggaggaaaggattcaagatcgactccacatcgacacgactgtttgccggctttaccgacttcacatctttcttattgaaggaagaaaacagcacataacgcagattcgggcggtctattttcagcaaccgcgcactgatccccttgtcgtataacaaaccgcggattccaaccgtatcaatgcttcctgccatgtaatcattctgtccgcaaaccgacaagggatataacctgattcgttccaggttgaaatccccgctttccgtgtccaatgtcatgcgcttcaccgtaaaccggtggtttcgtgccgtcatcagcccctcaataccagtcgcttcaaacgagaaaccacgcgaataccagaacccgcgttgagcctccgatacggaatctatccggaaatcgtttgcctgaaaatcgaagttcgccagtttatacacctcgatcttatctttaaccgcaaaagagtattgcaactttgcctgcccgataccgaccgtaccaatagaaaccgtatgtaagacaggcgagatcaattcataaagagacagggaacggaccagagaatccgcctccgcctcattcaggcttttcttctccgtttttttagcagacggcaggctttcccccgccagattaaaggcttgtatatccgaagaaataatatctaacgagcgcgccgtgaggtaattcagcgcattttcacgacggaactgtattcctttcacttcaatggctctgatcaacgcattcagatagctgtcgggccgctttttctgttccccccacaattcaccttggggtgtaagtgtaatattagagatagaaataatagaatcttccgtactcagcaggatccgatccgtttgcagacgaaagtcattattggccagcagcgtctgcgaccgcttagtaatgaaatcgaaattatcacaataaagcaacttcccactctcagacgaattctcatccaaacgaaaaccatacgcatggaaactgacatcattcaaggcatagataatcggggaaacaggattctccacggaataggaaacactggcgttctccagattcagcatccggacagtcaatacattaatataaggagaaaccacttcatacaaagtcttggtctccgcctccttcctttctttcacctccgcccgcgttgaatagtaaggattaaacacctgtatatcaggattcctaatttcaaatgagtcaaaatgcaactgcttgtaactccgacgccacgtaaggttcaatcctttaaaatcgaccatgccgacctcagccgtcacataggtagacggcaagctgtcctttctttcccaatcccggaaaaccgccgagtcgggacatagctttattccctcaagcgtcagttcacctttgaagaaactgatagaaagattatcgaaagaaagcctataaaagccatccgtagcctcggccgtccgatggatcagttctttccgaagataccgttcgaggcgtttggtcagatgaagattaagcaagaatatagcggcaatcagcaccattgcgatccccaacgtgtaccctatgactctttttatcttcctcataagacttaaataagattataacttcactccgtctatataaaatcaacaatataaacagagttaagttgcaaagtcggtaataatcccgtctgcgcctacgtattgtccaatcttgccaaaatatttgtttattccaggaattattgcgaaaattgcagagacacccctgtaaccggcgataaaaacagatcgcagttacctgacggcggacgtataagatcataaatcactaaacaaaaaaataatgggaaaagtagttatcaactcgtacgaagactttgaaaagctggtaggccagcaaatagggatttcagattatgtagaactgacacaagaacgcatcaacctttttgccgatgcgaccctggatcaccagtggattcacgtagacccagagcgcgccaaagtggaaagcccgttccacagcacaattgcccacggctacctgacgcagtcactccttcctcacctctggaaccagatcatcgaggtgaacaacctaaagatgatgattaattacggcatggacaagatgaaattcggacagcccgtattgaccggacaaagtatccgcctgatcgccaaactacagactttgacaaatctgcgtggcgtggccaaggctgagatcaagtttgccatcgagatcaaggaccaaccgaagaaagcgctggaaggtgttgcaatcttcctgtactacttcaattaagaacagaaacatgaataaattgaatcttgcggcaatcgctttatgtaccggcattacttttgcctgttcaccaaaagcttcgatggtaaaaggagttatctgcgatgcaaccataaatacgcttacagtcgtttccgaggagggtgacacactttctttcagtacgttggatacagaaagggtcgtaacgaatggtatcttgctcgatgatacggctatcgtatatcatagcgggaaatataagacagggatgaaagcgcaaaagattgtggttgtccccggaagaagaaacagggttggcggcgaccgggacaaacacggctgtatcggttcggccggctaccaatggagcgaagtgcagcaagattgcatccgtgtgttcgaaaagggtatccggatgaaagctgtcgacggcagccagtctgctttcatcgttttcagtccggattccacccaagtcgaactgttcttctcttcgggagataaaaacgagatactggataggcgctcactcccatccggtggatatgcttggaacgtagaggacgacgatacaaagaatgtacgccgcataaacggaaagtggactatcagtcaacgggggaagactatctattcgcaggaagagttccaaaacaagtaaagacatctataggtgagctgccggagtacagaagtacactattgttttgccagtccgtactgtgcatttcgaacaatgtcctaaacgcacaatcttttccaccgaaaagaaggagtaacgcatccagacttacaacttttccggcatatacttccagaaccgggcaggcatatgctggcggtgtaacttgggattgagacgttccttgatggcaatagacttgaagtaagttttccacatctgctggaaaagtttctcatcggcatccatcagttcctcaccgagcaggccggaaagaagatgggcttccttctcttcgaaacgaacttcggtagcttctttcaagtcgtaatagtaaccgtactcacgtttcaggtcgtaaagcaaccagcactggtcggcaaaacggtctttcagatgcggaagagtgagagggagtacattatatactggcttgacagcggcaaagaaagtcccgtccgccgctttttggaaacgaagaaactggatgacacgcaggcgctcgttcgtcacctttttccataccttggagacttcgaggacatcgggatcgccaaagttcagttcgatcgtacgcggagcgtcgatcgccttacggatatagcgaaaaagcagcatgtccgtttctggcagttcagatagccaagtaacggtaatcacagacaaagccatagcggaaagccgcttctgcaaacctttccaaacacgatccaccttggcatcgtccgtacagatcgtcactgcctcatcataaaacaagggaaaaggttctccttctgctaacagcagatcgggaaagctgcgacgtgaataagcatcaaaaacagcggtcagcagcccttcaaaggttttatcgtacacgaataccgtcatgattcttccttaaattggaggataagctgacggtcgtcggtactcttacgtcccgctttccggataaggatttgacggaccacctcaggtgacacttcgttaatcgtgcggactggcaactcgtggcatgtaatgaaatactgggctttcttcatcacgacacccatcttcttcaattgccctgtccccagacgggaatatcggcgggagacgacgatcaatttcgccgacttcaccccgataccgggtacgcgaagaagcatctcgtaatccgccttattgatatcgactgggaactgctccggatggcgcaacgcccaaccgagcttcggatcgacttccagatcgaggtcaggataggcatcgttcacgatctcatccactttgaactgatagaagcgcaagagccagtccgcctgatacagacggttctcccgaaccaacggcggttgcttcaaggccggcaaccgattatcgtattcattgacagggataaaaccggaataatagacacgcttcatcgtcggacgctgatagagggcggatgagagacgaaggatatccttatccgaatcgggtgtcgccccgacaatcatctgcgtgctctgcccggcaggcacaaaacgcggagcatggcgaaaacgtttccgctcttcagcgctctgcaaaacaccttgctgaatataacgcatcggctgaaagacgctctgaaaatccttttcaggagccaatagctgaagactcttctcgttcgggatctcgatattcacactcatacggtcggcatagagtccggcttcattcactagttcctggctggcgccgggaatacttttcaagtggatatagccgttaaaccggtatactgtccggaggtcttttaccaccctgacgaggcgctccatcgtgtaatcggcattgcgcacaacaccggaactcaagaaaagcccttcgatatagttacggcggtaaaactcgatcgtgaggttcaccagttccgtcaccgtcaatgtggcacggggaatatcgttactgcggcgattgatgcagtaggcgcaatcgaacatgcagtaatttgtcagcataatcttcagtaaagaaatgcaacggccatcctcggcaaagctatgacaaatgccccaccctgccgcacttccgatcccgccgctcttgttctttcgcgacgttccgctggaagcgcaagatacatcgtacttggccgattcagccagtactttcagtttttcgagcactttttcgtccataactgttaccgggatttcttgacaaaagtaagaataatcttttactatttcttcgctcccaaaagaaaagtaatcctaccttcttgaaaggatcactgtaccggaatacagatttctgtcagcaggttttcaggcttcgtattgcgtgggtcgttcagatagcgttcataactcggctcgtcacggagtgtacagcccatctctggcaatttctttgcatagatcgtatcgtaaacggcttgcagatattcatatgatcccttataaataaaggatgcatagcgaccggtcggaatctgcttggcaccaacttcgcctttcggcagaacaggttcaggcatgaccatgcaaacatccgtacgcaatttatcttctgatgttaccttcggatcgtcgtggtagatgcaaagcggacaaggatcttgggtcggcaggttatgctcgtgggcaaacgcatacaaccgcatccaagttccgccataatcattcaggcgataatctcccgtcagacggatataaatcacattacgaacagggatttcccttatttcagcctccaactgcaagtcgggccatatcttttctggtctcataatcgtgtactctttattgtttctatattcgttaggtgaaatagaatagaactgcctgaaagccttcgacaacgaagaaggtgcaccatacccgatacggtaagcgatatccccgacagatatatccgtgtagcgaagcagatgagctgcagtctcaatccgtttccgcacgatgaacgctcccaacggctctcctaaaaacgcactcatcacccgatgaaaatggtacggggacaaatgcgacatttcagccagttggttcaggtctatatcatcccccaaatgattattgatatactcaatcaccaggttcacccgtttcagatactcttctcttgtcgttgttcgttgttgcatgttctttttctgttttacttcgcaaaggtaccctcctttccgcctgataacttttccaatcttgctgacttatccatattttccgggaattcaggaaaagcccttcgatatagttacggtggtaaaactcgatcgtgaggttcaccagttccgtcaccgtcaatgtggcacggggaatatcgttgctgcggcgattgatgcagtaggcgcaatcgaacatgcagtaatttatcagcatgatcttcagcaaagaaatcctctatcactctatcactacaaaggttatagctattcatattcaagcgtcagaggcagtgatacaggacgttttcctctatcacttctctatcacttctgaaacaggacgtttttgtcatacaattgaaaaccaacacattgccttctatcacttttgaaaaagcatataaaataatcgaataaacaaatgtaaaaacgaatataacaggtattaaattggcggaatacggttcttcattccacaaaagctatctctttttttagcaaagacaagtacataaatccgtaaacacccccatgttgccatcctttacatccgggtgtagagagccggtacatccgggtgttaaggatggcaacatgggggtgtccggcaactaaagtaccgtgctggacaataaaaaccgcccggtttcacctattttactgccgtttttgcatgttatttttctgtttttacttcgcaaaggtaatgttcctcctacctgctaacttttccaatcttgtcagcttacaaatatttcaggcatcttcatgaacgagaaacaatccctcgaaataacatcaaggtgaaaggcaagccgatatcaaggcaagatggaaagccattcccgtatcgcatcaacgagtacttggttctcggctgctgtctgtgccgatatacggatataggtttcatccaggctgcggaaattagaggcgtcgcggatcagcagaccatgacgatcccacagatactgtttcaacccagcagccgtcccttttttcaggcggaccaagaagaaagttacggatgtcggtaatgcttccaagtcgcccagttcattcagccggtcgatcaggctggctgtctcgcgttgccattcacagatgggcaggatatattgctctggatgcgtcaagatgtatttaccggcttccacagcaattgcattgacagaccagggaatgatgtaccggtttatctgctcgaccttatccggagaagcaatcaggtagccgatacggagtcccggtatattatgcgctttcgaaatagattgtatcaggatcaggttcggatggttgcagacatccgaaggttccagcaacctttccgtcgtgaaagcgacgtatgcctggtcgatgataaagacggtctgccggttcgcctcgatcaatgccagcagttcggcccggcggatcagtctgccgtccggattattcgggttacagatccagcagaaatcctgtccttccagcgagaggccggacaggtcgcacgaggtcggaaagaaactgacttcatgcccgtgcaggcggcaagcgtcttcatactccgcaaaagagggaacggcaatagcggatttcgcccctttccaggtttgcgccagcagatagaatgccgtgatggaaccgttcgtaaccactatattctcctcttccacctcatagcagcgggcaagcaatcttttcagggaagaagcatccggttccggataacgcgtgagttcataaaactgctcgttcaggtgttccctgagtgtgcggagatcggctccatgccatacatttgaactgaaatttatctttacctctttctgtgaattatagtggtcgtcaccgtgtccgaataacatctttgggggaattatgatttatgaattatttgattgctttatagattgcgtcttggatacgtgtgcggatatccagcgaacctagcttgttgttagcccgtgtcgggttcacacggttggacaggaagatatacagcaggttgttatccgggtccacccaaaagcaagtgccggtaaaaccggtatgcccataaacggaggcgggagccaggctgccgcaaggagatgctttacccccaccggctaccggcttgtcgaaccctaagccgcggcgacaggtcggacttttactttgggtgaaaagacggcaggtttctttggataggtattgttcacctccgtaacttccctggttcagatagagttgcagcactttcgccaagtcgttggcgttggagaaaagcccggcattgcccgaaacgcccccctggaaagcggccgcctcatcatgcacatagccacgaagcagttgccgacggataaaatggtcgttttcggtcgggacgatctgcatcgtgtcgaggatatgcaacggattgtaggccgtatgccaagctccgagcttgctgaagaacatgccatgcagcaggcggtccatcggctgccgcatctgcttttccaccatcatcttcaacaggatgaaattgatgcaactgtatttgtacttgccccgcacgccgaggcgcgagtccttgatctcctggataatggtgtctttaaaagagtcgtgcagatacatgttgcgggcgatctctgtcgtaaagcccggctttttccgggcagataccagattgggaagaaaagagaagtcgttgcgcacataggtccgggcgtcgaaacggaccggatgcgtctggttcttcgcattgctgtacaggctgcctttataactatccttgtcgatcgcgttcaggtagaaattgatcgtcggcgtcagcccggactggtggtagaggaggtctttgacagctaaattctttttatccgaatcctttagttcgggtataaaatcggatatcttattgttcagcgtgaacttcttgtcatcgtatgctttcattacagccagcaaggtccccgccgctttggaggaagaagccaggtcgtagacggagttttcatcaacagcttgtttcttatcgtagtcgaaatagccgaacgatttgtcatagataatcatgccatctttggcgacgagcacctggcaaccgggaaacgccttctgttccagaccgtcttccacgatagaggcgatcacgtccaaacgttcgggacttgcctccacttcttccggctcgtgataaccgagacgtgtcttttcggtaaacacacccgtcccagccgtgtagagggtagggatggaaaccggcagctttcctttaaccgcaataccgccgaagatggcttgcgccgcatatttctgagcaagcggtgtgccctcgtaggccattacgaccgctttggctttcaggatggaaggtttatatgctttacaaaaatagggcaaggtgaaaaaggcatagaccagttccttctttgccgccagctcgcacagagccgagctttccggaatgcggaccgtatgcacgccgcaaatgaccacatcgtatttctccaatttcttatatacactctgcacttgggctgccgtcgcattccgactgatgctgaaacaggcgaccgagtcgtagcgccccagcatcttttggaactcgttccctaccccgtcaccgatagacagggcggcgatctttttcttatcgagctgcttcaacgggatgatatcgccctcgttcttcagcagggtgatcgcttcttcattcaacttggcggccaaccatgcggcatggggagagttcaggcgttcggacaatcccttcgtctcgaccgggcgatagtcgttcagccctgcgatgtatttatattgcaggatcttgatgatcttcgcttctatctcttccctgtccaaaataccctcttctaaggcctccttcacggctgcaaagtcgttaatcggcgcagtcggagccaaaaggatgtcattgcccgccaatagcgccattacggaagggttatcggatttacgggtagtagcgcctttcatcgccaaagcgtcggtaaagcacagccctcggaatccgagctctttttgcagcaggtcggtgacgacggcacgggacatggagaccggcttattgcgtgccttgtccaacgccgggacatacaggtgtccggtcatcacgccggcatagccgtcatagatataacgcttgaaaggcagcaactccacactgtccaggcgtgcccggtcatgatgaacggcaggcagcgtataatgggaatcttcggcggtatcgccatgtccggggaaatgcttggcgacagacaggatgccctgcccttccagcccacgggcatacgcaagccctttgtcggccaccgcctcaggattctcgccgaaggagcggaggccgatcaccgggttgtcggtattgctgttgacatccatatcgggtgcgaaattgatatggattcccatctccttgcactgccgggcgacttccttgccgtattcggttatcaggctgttatcctcaatcgcccccaacatcatgttcttcgggaaacgggtcgtaccggagaggcgcatggaaagtccccattcgccgtccaacgacacgagcatcgggacgcgggaggctttttgcaggcggttcgtcacctcggcctgcgtgaccggatcacctttatggaaaaggatgccgccgatctttatttcgttgacataacgcatcaggcgttgcatattgcgggtgtcggatttcgggttggcgatgaccataaagagttgcccgatacgttcgtcataactcatcgcatcgaagacggagtccacccagtgattcattttctccttatccactgcccggtaaaggttcggcgtcgtctgtgcgacagcggaaagaacggtaacacaactaaataaaaagatatatattttcttcatcgaaagagttgaaatttatgatttataatttatgatttataaataatgatcacaatgtctttctaataaatcataattcataaatcataaatcaaaacaaatgtacggaaattaccctgatatttcctacctttgaagtgtttactaactattttttaatctaaattctatagaaccatgcaaagaaggcactttatgaagctgacaggtatgttggctacgcttccggccatcaaggggatagccgcaacctccgaaaaacccgctccatccggaaagcagctatacgaatggcgaatctacacactggaaggagatgcggacggcctggacggctttttccgcgacacactgatccctgcctataaccggaagaatatcaaagcaggcgctttcgtcccttataagaaagaggaaaaagaacggcgtctactgctgttcatttatcccgacatcacgacttatcatcaggtgaaacggaccatctgggacgacacggtattcaggaaagcggcacagccttatttcgacaagacggctcccaacccggcttacttcaatttcgaaagtttcctgtgcgaagctttcgacaaagtaccttcccttctgatgccggacaagaaccggacgctgttcgaactcaggacgtaccacagtcccaacgaagaagccaaccagcggaaagtcgcgatgttcaataaagatgaaatagatgtcttcgacaaggtcggcatcaactccgtttgctacggagaggtactggccggtccgatcatgccggcggtgatgtacctcacctggtacaaggacgaaccgacacgcaatgccgcctgggacaaattccgggcacatccggactggcaacggatcaagaacctgccggaatatgcctatacagccacccgaaacaccagtctgctcctctcaccattgccttactcgcagatataaggaaattaaaaataaaaaaacgacagttatgagacaagccatattcttcctgtgtctttggagttgcagcctattggcgggacatgcccaggaagccgatgaagcgaattacgacgaaagcaaaattcccccttataccctgcccgctctgttaaagactagcgacgaccgggaaataacaaccgtgcaacaatgggaacagatcagacgcccggaattgctgtctgtctttaccgaacaggtatacggaaagatgccggcggacaaggtggatgtgtcctacaaaaagttggacgacaaccacagtgccctcaacggcagtgccacccgcaaacagatcgaaatcacattcagccataatggtatagaacggaaagccctgctgctgatgtatctgccgaaccatgtcaaaacaaaagtgccggtattcctgcatttcaacttccaggggaatcagacagtttcttcggacccggacatcatcccgtcgcaatattccgaccgcccacgcggcaaccaagcatcgcgctggccggtggaaaagatcatcgacgccggttacgggttggccaccgtccattacttcgacttcttccccgacagcaaggacagatatgcggaaagtattctcgccctcttcggtcatccatctgaaggagacattccggcagacggcggacaagcaatcgctgcctgggcatggggttacagtcgggtgatggattacctcgaaacagactggcaggtcgatgcctccaaaatcatcctgatgggacattcccgcttgggcaaaacctccctttgggctggcgctaccgatccgcgttttgcaatcgtcatctccaacgaatccggatgtggcggagcagccctatccagacggcaggtgggtgaaactgtcaaccggatcaaccacgctttccctcactggttctgcaagaacttccgcaggtataacaagaaagaaggtgaactgccgatcgaccagcacgagctattggccctcatcgctccccgccccctttatgtggcaagcgccgaagaagaccgctggtccgatccgaaaggtgaatttctttcaaccgcatacgccggagaagtctataagctctacggaatgaaaggactggaaacgaccacgatgccaacggtcaacatgccgatcatgaaccgtgtcgcctaccacaatcgtaccggagtgcatgatgtgacagatttcgactgggagaactacattaagtttgccgataagtggctgaagtaaaatttatttcagactgctacttgcgtatcaaataattatttcgttactttgcatccgctttgcgtaatctctgtcgggacaagtagcccgttatattgcgtttcattaaaaattacaattaaaaagctataaaacaatggatttaattaaagttgtaaacgaagcgtttgctacgaaaaaggaatttcctgcattcaagagtggtgacactattacagtagcttaccgtatcaaagaaggtaacaaagaacgtatccagcagtacagaggtgtcgtaatccgcatctcaggtcatggtgacaaaaaacgcttcacagtgcgtaagatgtctgaaaacgtaggtgtagaacgtattttcccgatcgaatctccgtttatcgaaagcatcacggttaacaagtatggtaaagtacgtcgcgctaaattgtattacctgcgtgctcttaccggtaagaaagcaagaatcaaagaaagaagagtgtaatctctgtggttctattgccatacgaaaagaaggtgtgtcaaaattcgcaccttcttttttatgcccaaagccccgactttcacaagctggggctttgttataacctgaagattttgtatctttaggcataagaatttatactatggcaaagatacattttcgtccttacaatcccaaccaaacagtgctttttcctcaaagaatagatgaggatattgcagataacgatccggtgcgcatggttgacgccctggttgagggcctgaatcttgaaagtttcaggaagctatataaggaatgcggccgcagcccttaccatcccaagatgatgctcaaggtcattctgtatgcctacatgaacaacgtctactcctgccggaaaatcgaaaagctccttcatcgtgacattcattatatctggcttgccggatgtgagaaaccggatttcattaccatcaaccgtttccgcaatcgggtgaagaaggaaatcaacgaggtgtttacccaaaccgtactccttctctcttccaaaggcttcatcagcctgaacgtggaatacattgacgggacaaagattgaatccaaagccaacaagtatactttcgtttggcgaaaaacggttgagcggaaccgagagcgcctgatgaagaagatacatgtcctgctagggcagatagacgatgtcatcgcccaagaaaagtcttcggaaagtaatgaggaggttgagttcactccggccatgctgaccgaaatggcgggagaattacgtcatgtgctggaacaggttcccgagccttccaccaaggaggaaaagactgagctgaaaaagagacgcaaacagctgaaggagctggaagaacatagggacaaactccaggaatacgacagtcatctggacacgctgcaagagaggaattcctattccaagacggacaaggacgcaactttcatgagaatgaaggaggatgccatgcgtaacgggcagacgaagcccggttacaaccttcagatcggcaccgagaaccagttcatcaccgattttgcactcttcccgaaccctacggatacactgaccatgatccctttcctgcaatctttttcaaacaggtatgaccggatggctcatacggtggttgccgattccggctatggttccgaggagaactaccgcttcatgtcagagaacggcatggaagcttacgtcaaatataactatttccacatggagcagcggccgagattcaaaccggatccgttcaaggcagaaaacttctactacaatgaagaacatgacttttgcatctgccctatgggacaaaggatgcggaggataggtactagacatgtgaaaaccgcatccggatatgtcagcgaaaatgccaggtacagagccgtcagatgtgaaggctgtccgctaagatgccgttgttttaaagcaaaaggaaacaggacgatagaactgaatcacaggctcagaaaatacaggcaaaaagccaaagagcagctctgctccgaggaagggctgaaacacagaggacagagatgcatagaaccggaagccgtgttcggacaaatgaaaaacaatatgaattacaaacgtttccgccattttggaaaggacaaggtcttcatggacttttccttctttgccattgccttcaatataaaaaagatatgtgcaaaaatggctaaagaaggtatggattggctgactggactgttttatgagcttacagtagctatatttagatgctgcgaacacataaatcgaagaaatcctcaaaatatcgcagcttaaaaaaatgagccgatttttatagtcaacgaaaaaaagaaggcgcatcgggtattacgacacaccttctttttgtttattgatgttcctgccgcagcaaatcatttaccgtcttgaccggattgaaggtctcgataggaacttcgacgaagattgtattccagtcgctcatcgcaccattccacaaacctggcaattccaatgctttcaattcgcggccgtccttgctcttacaagagataaaaccggtattcttatctacataatccggcaagttgaacttctcgcccttatagttcttcaacgcgcataccagatccaccggattgaagtgcgtgcccttttcgaacatcgctttcttttcgggatccttcaaatcaatctgcgagctttcgagaatttgcagagagacagttccatccgggttgacagcaaggaacgggccaccacccggctcaccgacattcttcaccataccgcagacacgcaacgggcggttcagcttactcttaatataaaggatcaactcggcatcttccaacaacttcgtttccggattcttcacgcacaactcctcctgcaagaaatgaatcatctcttccacctggtcgtgcgaatacttgccgctatcgatcagctccagatacttgaagatgcgttcctgcaaagaaaccagcacaccagcgatcaccttcttgaagataacggtcgagcatttgaaactgtccggaaccacattgtcgatgttcttgacaaacaccacatcggcatctacatcgttcaggttttcgatcaaagcaccgtggccacccggacggaacaacagattaccgttcttgtcgcggaacggattgttttccatatcggcagcaatcgtatcggtactcggtttctgcacgctgaaagagatatcgtatttgacagagaatttctcttcataatctcccgtctttgcagcaaccaactgttcgaacaacgccttatgttcgggcgacacagtgaaatgtatattcacttcgccggcattgttcttcgcatacatcgcaccttcggccagatgttcttccatcgccgtacgggctgtctgcggataagaatgaaaaagcaacagacctttcggaagctgtccgtagttcagtcctttcgactccaacaggttggagacaacagccttatactgtccgagagcgattagtgcaggaatatcttttgcttcattctcgatgcaagcccggttcaaggcatcatagaaggcaaacttcctgatatcatcaaaaaacttcttctcaaacgcattctgaggctcgttatagtcggcagacaggaattcatacagattcttgaacatacggcttgccgcacccgaagccggcacgaacttcacgatcttcttattctttgccaggtaagcatcccaggcatccatataggtagcctgtttctcctgcgggattaccataatccctctctcgaccgacgccgaagctgtaatttccagaaaaggaaaccctttcacgaaacaagccaactgctcttcaatctgcttttcgctgattcctttagccgccagtaactctaagtcttttgcgtttaacatagtatatctttttaattagttaataatcagacacgctacaaggcccttccggcctatgtatatcgcaaatgtataaaaataccattagaattgcactgatattcggagaaaaacttatttttacggtatgttttacggacagcccacaaacaagctgtaaaaagacagacgactatggatatacaaccgttctttaccgaagaggagaaaaaacagtttttctccaagtacaagcaattattacgccatctgtactctttcctgaaaaaagaagatctgagtaaaatgaaagagttgatgaagcgggttgtggctttggattgttacggacgagacaaaaacggcattaacggcctgctccgcaatatcgacacggcattgatcgccaccacagagatcggattgaagcgcacgtcggtcatcgcactcctactttaccgtccggtcatgaaaaagatcatcactttagatgaagtgaagactacattcgatgcggatgtcaccctgatcatcagccgtctgctgaagacttcggatctttacgcccgcaatacggctgtcgactccgagaacttccataaactgctgttctcgtttgccgaagacgtacgcgtgatcctgatcatgatcgccgaccgcctttgcctgatgcgcctcggcaaacaattgaagaatgacgaggaccggaaacggctggcaacggaagtttcctatctatacgccccgctcgcccaccgcctcggcttgtacacgatcaaaagcgaactggaagacttgtcgctaaaatataccgaccgcaagcaatacgattttatcaagcagaagctgaacgagacgaaacgttcgcgcgacgcctacatcgccgagttcatcacccctatcaaaagcaagctggaggaggctggactgcagttcgacatcaagggacgcacgaagtccatccactccatcaacaacaagctgaaaaaacagaacatcccgttcgaagacatatacgacttgtttgccatccgtatcatcctggacacaccatatgaaaaagaacgttcggactgctggcaagtctactcgatcatcaccgatatgtaccagccgaacccgaaacgcatgaaggactggatatctatcccgaaaacgaacggttacgaaagtctgcatatcaccgtgatgggaccacagaacaaatgggtggaagtacagatccgtacccgccgcatggacgaaattgccgaacggggactggctgcccattggaaatataaagggggaaaagcggaaagcgggctggacgaattcctaaatactgtccgtgccgccctggaaacgaaagagaacaacccgctcgacttgatgcaggatttcaaaatggacttgtacaaagacgagatttatgtattcaccccgacaggcgaactgatcaagctggccaaaggggcgaccgtgctcgactttgctttcgcgatccataccaagttaggatgcaaatgcgtctcggcaaaggtgaacgagaagaatgtacctattaaatataccttgaacaacggcgacacggtctccatcgtcaccgctcccacccagacacccaaacgtgactggctgaacatcgtcgtcacctcgaaagcgcgggtcaagatcaaacaggcactccgcgaagagactgccaaggcggtggactttgccaaagagatgctgcaacgccgcttcaagaaccggaagatcgagatggaggaaccgatcctgatgcgttacatcaagaagaaaggtttcaagaccgtcaccgacttctacgtcgagattgccgaggaacgcctcgacccgaaccaggtgatcgacgaatacctggaacagctccgccgggaaacggaaacgaacgaccacaccgaagtccgcagtgccgaagaatacatcacgacaaccgaagtggaagaaatctcgaccaacaaggatgtcctggtgattgacaagaacctgacgggcatcgagtataagttggcgaagtgctgcaacccgatctatggcgacgaggtgttcggtttcgtctccacgcaaggcatcaagatccaccggatggactgcccgaacgcacaggaaatgttcagccgcttcggttaccgcatcatccaggccaaatggagcggtaagggggacaacggatatatcgtcacgctccgggtcatcggccgtgacgacatcgcgattgtcaccaacatcacttccgtcatcagcaaggaaacgggcgtcacgctccgctccctgaacatcgactcggtggacgggatcttccaggggaacttcacggttatggtgcgcgacacgacggcgttaaacatgctgaccaagaagatcaatgctgtgaagggggtaaagacggtcgaaaggttaaactcctgaaacgagttatccgttgcaaacgaaattgcattcatagcccaatagaaaatatgacggacggaatcaacacactgcgctattcggattttttcctggccatgtacttcgacggaggaaaaagttgcttacataggaaccattcccatgtgttagtttacatgtactccggtgaaatggtcattgatgaaagaggaaaaaccacccggctgcataaaggtgattgcgcctttatccgcaaggacttcagtgtacaaatgaccaagcaggcatggaacggggaacagttcaaagccatattcctgatgtttacctccaaattcttgcgtggtttttacaatcgtctggaccgggatgcaatacccaaagatgccaagcgagatgaaataagcttgtacaagctgccgtccaaccgccccgatatcgtaagtctgttcgaatccatgacaccttacttcgattcgaacatccagccgacagaggagttattgcaactgaaaatgatcgaaggtatatatgtgttgcttaatacgagcaagaacctgtatgcttctatcttcgactttacggacccgtggaaaatcgacatactggaattcctcgaaagtaattacatgaacgatatatcgatggaagagatcgccaattataccggccgcagcctatccacgttcaagcgggactttaaaaagtgcagtacgctttccccgcgggaatggttgatacgccgtcgtctcgaagccgcccgcgagttgatacggaaagggggacgcaaggtatcggatatctgctttgaagtaggattcaaaaacctttcccacttctcgaagatttataaagaaacgtacggcattcctccgacagaggatacacagccgggaatcagtctcgcataggttgcgggacttttttatttgtggactttccaacaaagcattttgaaccacacaacaaaaccattacgccactacccgcctacctttgcatcagaaaacgaaataaagaaagaataacatgaagactatctttgaaaaagatttatcgggtgaaatagtttcgcccaatgagccaggttacgaagcgttgatcaccgacattttcgctaccatccgaaccgccacggagatgaatacgagttaccacacacctgaagaagtacacgaatacatgagccggattctcggcaaacccctcgaagagagcacgacggtactgccgccgctctacatcgactacggtaagcctgtcacgattgggaagggatgtttcatccagcagtgttgtaccttcttcggacgcggtggcatcacgattggcgatgaagtattcattggtccgaaggtcaacctgatcaccatcaaccacgacccggatccggaaaaccgcagcgcgacctacggccgtccgatcgtaatcgaagacaaggcatggatcggcatcaattcaaccatccttccgggagtacgcatcggctacggagctatcgtcggagccggtagcgtagtgactaaagacgtgcctcccatgacagtggtagccggcaatccggcaaaattcatcaagaagatagaaacggggaaaggtataaacgataaattagattaagttactgattgacaacactcccgattctcacagctctcataggcttgagaactttttctcatcatcatgagaatttattctcataggcatgggaaaaaatgctcatcggcatgagaaaactttcccctgcacacaagaaagttttctcatgccgatatgacaattttcccgtgcctacgcccaaacgctctccttggcataagaaaaatataaactcaggatttaccaactatactcttcctgatattcatcataaaccggttcggtatcgattccgttattgacgaatatctgccggatatgctcctgttcggagggcgtgacatggcgttctttatgaagaatccggtaaaacatgcttcgcccgaaataataatatacctgtcttctgaccgcaatcgcctttcgataattcaagtcgtcaaacatacggctgatccccaatccgtacacagccatccggtcagctttgaaataccgacaattttcaccatccggcgaaacattattcgggtttatgacaggcacggaatacctgctctccggaatccgaagggcaacttgataacggaggcatttatcagccactttacactgcccgcaaaagcaatgagaaaaatcgaaagggacggattcgtaattaaattcaggcttcatctgttcttctatttataattattctcaatcattcctttaccggtttcaaccccatcttcttcgcccgttgaagcataaaagcatgggccgcctcgtattcgttcgggatcacgccgtcgaggatcgcgttcttgatggcttctttcaggacaccgaccggctgggaagggggaagtccgaatgtttccataatttcctcgcctgtcacagggggctggaagttgcggacacggtctttctcttctatatcggcgagcttgctgcgtaccttctggaaattggccaggaaacgacgtaccttttcgggattcttgctcgtgatatcggcttcgcaaagtttcatcaagtcgtctatatcgtcgcccgcatcaaacagcaagcggcggatagcggaatccgtcacctcatcgtcggacaaggcgatcgggcgcatgtgcaggctgaccatcttctggacatatttcatcttctcgttcatcggcagcttcatcttgcggaagataccgggaatcatcttctcaccaatgaaattatgattgtggaacgtccagcccaggcgcgggtcgaaacgcttcgtcgccggcttggctatatcatgaaaaagggcactccagcgcaaccacaggttatcagaggtcttgctcaggcggtcgagcaccatcaaggtatgggcgaagttatccttatgcccgatcccttccttcgtctccactcctttcagggcacagagttcggggaaaatcagcggcagcaatccgcaacgttccagcaggtcgaagccgacagaaggtttcggcgaaaggacgatcttattcaactcatccacaatacgctctttcgagatgatcgagatgcgctccttgttccgttcgatcgcatcgaaagtgtcgggatcgataaagaatcccaactggctggcaaagcggacggcacgcatcatgcgcaacggatcgtcgctaaacgtaatatccggatcgagaggcgtacggatcagcaaattatccatatcggtcaagccatcgaaaggatcgaccagttcaccataccggtccttattcaggcaaagcgccagagcattgatcgtaaagtcacggcggttctggtcgtcttcgagcgtcccgtcttcgacaatcggcttgcggctgtcatgcgtgtaggattccttgcgggcgccgacaaactccagttccagatcgccggctttcacctgtgccgtaccgaagttcttgaagacggacagataagctccccgtcccaatttccgggcaacagcttttgccagctcgattccgctcccgacggcaacgacatctatatctttggaaggacgatgcagaaagatatcccgcacataaccgcctatcacatatgcttcaactcccaattcatccgccgcctccgaaatcaaatgaaacggcttcgccgaaatatgttttaatatgtcttcctgttctatatacatatatatatattgtttatcaacaaatttatctgttacttttggatcaagcccaaagcaacagacacgcaaagataattaaattcttgcggggatgctaattctctctttttccaatatctttgcagggaataaaagtagtagacaattaaagaagtatcataatgaaaaagtcagcaatctgtataacacttgcaaccctggcactggccggttgtaacaatgacgagaagaatgcacaggcaaggctggacaatgccagaagcatgtatgaacagaatgagttctttgctgccaaaaatgaaatagacagcatccgcatcctatacccgaaagagttcaaggtgatccgggaaggtctgacactaatgcgccaagtggagcaaaaggaggcggaacgcaacttggccttttgcgacagcctgatccctgtcaagcaacaggaattggaaggattgaagaaaggttttaacttcgaaaaggattccgcctataacgaaatcggcaattatgtctccaagcaacagactatcgaacgcaacatccagcgttgttacatccgctctggcgtaaacgagaaaggagagatgtacctggcaagtgtttatttcggaggcaagccaatcaatcataccggcatcaagttgagtacccaggacggacttttcgccgaaacgcctgccattccttacgacggcggcctgaactaccatttcaaggacttggggaatacgaccgaagtcgtgacctatcaaggagaaaaatgcgaagatgccgtcaagttcatttttgccaataaagagaagcgcatcaaggttgaatatacgggaggcaagccttatattctctacattgccgatgcggataagaaagcaatcgcctcgacctatgaactggctgtcgtattaagcgacatcgaaaagctgacgaaagagaaggaaaaggccactaagaagttggcttatctggaaaagaagctttcaggtgagaaataaaaacatctccaaaaattactaaaaagaaaggcggctccctttgcaggaggccacctttctttttttataagatcatcgtccttattttacaatcactttgtaagtggcgtcaccttcgactgttaccaatacaatgccggatgttgctggcattgagaagtattcagaatttgctctgcgaacaccgattatctgtcctaagatattagataaagtaatcatcttaccggaagcattcgtcacgataacctgaccgtcattgctgatcaccttgatctctgaaacattcatttcttcattggccgtcggagcggaagcggtctgtacttcgaatgctgcactcggagtggcctgcataacggcaaaaccgttcacaacacctacataaggcttaccattctcattcagctctttctgattttccagataataaccgccttcttctgcagtcttgaatgcgaagagagcagggttgttcttcattgtcttaatcgagtcatgagagatgaacattgcataagtatcggcatcgatacctgctcttgttgtatctttggcagctaagtaatagcgaatatttgcttcggctttgccaccattagcgacaccggaagaaataaaatacaattgtttaccagcaatgactgtatcttgttcaacccacaaactaaaattatctgctccataatttgtttttgtaatcggattaccttcatctttcatttcagcaaagaagttcagcggattcatcgccaaagcattgttgttataagccaaacgcttgtgagcacttgcaaatgaagcatattcgggggcgtcaacggcttcaaggtttacgtaagctgctttctctgacaactgtacacaagaagtattgacattcatacctacatactgattagtagaagacaacatagcatacttttcagcagtagcatcagaaataaatctaaaagattcagcagttccaacagatgagaacttcagactatcattctgttttgcgagcatatctttattaaacattgctcttaacttatatgaagtgacaaacaaggtatctaacaaactctttgcaccaccagcttcttcaactttatccactaccaacttaaagattgctgcatcttttgcatcaccgactttacctttcaagatagaatctgtagtatatgcataaatattacttactcctgttgttccagaaaccaagttcagtacataaccgttagcgttcaattcttcttccgtaaaatagagagaacctaaatacttatcattcagattaacctcttgtttaaatattttcacggagtcagaaccaaacaaataagtgttttcttttccttgtacagcaaaaacttcctgatctacgatcatacttgaatttgattgacgatcaacaacagaatatttaccattattttctttaatataccactgacctcttgccaaattcatagaaggaacgctgtcacctcccataaaggcatctttcgtcacataatatttaccgttatcagcaccttcgcttaccttctgtaagaagtaaacacctgtaccggtcgggattgtaacaggagttccttttgaaacattaatcaaaggaagtttaccctgcaaaggctgagcacccactccaaacttagacacagttaaaaccttggtattgccaacctgagcataaacaacgcgaaccgtatcacccacttctgtattaacgtctaaattatcatcaaaatcaggagctcctgcaacaaacattgcaatagaatcattctgcaaattgacaacaaacttaaagtgcttgcaaagctcattaggacgcaaaactttacgaattgaatctaatgcaaaccctgcaccaaatacatcctcttgattattgattgtcgttttgagtgtatcaacacctaaaaacttctttacaccatttgaatatgcttcatcacctttcacctgtaaagtcataaaacctttatctccaacagaattagcaatcaaatcttcacctgtaaagatattcccttcatatttatcaccaaatgtcaactgaaaagtactgaaaccatcgccgagatcctgcggggtcatggtcattgtgtcaggcttagttacagccaacttcagctcacttcctccagtaaaaacaatgccatcattagcacctaaagccaatgtcatttttttaccatcacttagtgaagcacttaaactgcctccatctgtaaacgtccatttgcttacgccagcagccaaagtaggcttagcatcttgagatgcagcaaaagataaaacagcatttgtctttttgttcttaaattgataaactgttccagcagtttctgttattcccgtaatttcccaaagagcggaatcacgagcagctttattcacattctcaaatgaagtgatttctttcactactaccgaatcagccttgttaccatccaaagacaagtatttattaccactcttcaagtaataataattaccgacagtccaatcatcacttgccgcactcgccgcagtaaaagttcctactgtcattaaggccgcagccaaaagtgtaaattttttattcatatgcaaattgtttaatcatttaatcctttaacagaggcaaagatagaaaagttcagtcgcacaaaattataatctactataaaagatacttacatctgggcataatgtacaaaagcgccattatccgtgccataataaaaaaggctcgccaccaaagtgacgagccgggaatcattttctcttataatcaaataataatactaaagtaatgaaataaagttcttaatatcttatacttatatcgtccttgttaattattataatgattgacaaagataaatctttttatccaaagtcctatccttcaaaaggactccttacaaaaccgggcgattattgaacgaacccatttctttttaggacaaatcagttatcagcccgatgcacagtaagttgcgggaacgggaagttgatgcctttttcattaaatgttgcataaaccgcttgattgatgccaaaataaacttcccaataattcggactttccacccatacacggacaacaatattcacactgctgtctgccaacgcatgcaaggcaatgaaaggagccggatcagtcagaatacgagagtcacgggcaataatcgtttcgatcaccgcctttactttatcataatcctcaccataatcgacaccgaatgtccaatctactcggcgggtagtctgccggctaaagttcgtaaccgcaccactgctgagcgaaccgttcgggatatacaccattttattatcaggtgttgccaagatcgtatgaaaaatctggatttccttcaccgtaccgcccgtaccttgcgcttcaatatagtcaccgactttgaatggcttgaacaaaagaataatcaatccacccgcaaaatttgccagattaccgctcaaagccataccgacagcaacacctgcagaagcaagaagagcagcaaacgaagtcgtttgtacacccaaagcaccgacaaccgagatgatcaataaaatagtcaggacaacatttaccaaacttccgacaaaagttttgactgaaggatcgatatcacgtttcaataaaacccgttttatcagtttattcaccaaattaatcaggagacgcccgactataaaaaccaaaaacgccttgataagtgtccatcccaacgccgccccttgcgtcatcagggaattcaaaataccttccagaccatgtgaaaggtcaattgctgttacaatcataattatttatatttatggaaattcatactaattacataacaatcattcattccaaaagtattagaaattgtagcaaaggtataaagtttttttattcgaataaagaaccgattttattatgtagttttgcaaacgctcagaaaacagatataaacaatagaaaatgaggactttcttgattattataggtttgttcctgtttataggaaacagctttgcacaatcatacgaagaattaatagagaaaagctacgacttcgtagataaaggcgatttggtgtccgcggaagagagcctgaaagcggccatgcgcaaagaaccggctaacccgttgaactatgccttgcttacgaacctcggaaccatacagcgccgacaggggaagctgcaagaggccctcatctcctacacttccgcactaagcgggcatacaaagaacatcaccattctcgaaaaccgggcttccctttatacagaattgggagaaacagaaaaagctttgaacgattacaacaccttgttaatagaaaatccggaacatcaggaggcgctttattgccgagggctgctctatatacagttacaaaattatatgtgggcagaacaggatttcgacaaaattctggaagtaaacgagaaatcggttcgtgctcgcctcggccatgccatcttggaaaagatgcgtgggaactacgacgagagcgaacggatattcaattacctgattagcgagatgccccgcgactggatcctctacgaaggacgggcggatttgtattttatgatgggaaaaaatgcacgggcaatggcagatatagaaaaagtctttaccgaaagcgaaccgacagccaacctctatgtgttgagaggcaagatcaagctggcacaatacgaaaaggagcgggcagccctcgatttcaagaaagcagaatcaatgggatacaataaagaagttatcaaggaacttcttaaattgacaatgaacaattgacaattaggcttcgcgttaccaaaatcggctgaaaaccaaaataattgtcaattgtcaactgctaatgtaattgtcaattgttaatgtaattgacaatccatgtccctacctctttcgtgccatacttcgcaccgccttccatctggatttcaggagtacgaacattagcgtccagagaagcatccacagcctcgcggatcaaggctccttccgccttacaaccgaaatactcgaacagcatagctaccgaaagaatctgtgccaacgggttggcgatattcaatcctttagcctgcggccatgaaccatggatcggttcaaatacaggagtgctttctcccgtcgaagcagaagggagcaagcccatagaaccgctgatacaagaaccttcgtcagtaaggatatcaccaaacgtattctccgttaccataacatcaaagaatttgggttcctggatcatacgcatggccgcattatcgacatacatatagtcggtctgaacctccggataagaaggggccatctcttgtgcgatctggcgccacaaacgcgaagaagccaagacatttgccttatcaaccaccgtcagatgttttttccgtttcatggcatattcgaaaccgactttcaagatgcgctcgatctcagggcgtgtgtacatattggtatcgtaggccttatcgttatcctgatatttctccccgaaatacatgcctcccgtcaattcacggatacacaagaaatccgcaccatccaccaagtcagcacgaagcggtgatttatgcaacaggcacttaaaagtttgtacgggccggatattcgcaaacaagcccaatttcttacgcatagccagcaatccctgttcaggacgcactttagctgtcggatcgttgtcgaacttcggatcacctacagcagagaaaagaacggcatccgctcctttacaaatctcatacgtttcttccgggaaaggatctcccaccttgtcgatagcatcggccccgcaaagagcatattcataacggacttcatgtccgaatttcttacaaacggcactcatcacctccacaccttgtgcagcaatttcaggaccgatcccgtcaccgggaagtacagctatattcaatttcatatcataaatgatttattagttggcaaattttcctattctctcttaaaatagacgtatttgggttctgtcgggacatagctttcatcatcccacaatgtacttgtgatcatcaagtcggcactataccggttacaagcgataggcacgttatggacacggcactggcgaagcaacatctggatatcggcctcgtgcggctgtgggttcaagtcgtcgatcaagaacacggcaagatctatttcctttcgtactaccattgctgcaatttcggcatctccacctagcggaccggaatgcatacaggctatatccgccgaaacacctttttcttccatcgccttccgaaccagatttccggttgtcccagtacatacgatgtgatgatgggacagaaattcagcattgtgaacagcccattctaccatgtcagccttccggttgtcgtgcgcaacaagcgcgattgttaacttcttcataacttcaataattaataatttatcaatatgataatttgccaatgtactaatatgccgatagcctacatcgcaattctctttcattggcacatcggcacatcattattgttctatcttgttcagcatcttcaatgtcgccttgatagcagcctccgtctggtctgcatcgagaccacgtgttttaaagtccactcctgcataattccaactaatgatagtctgcacaaaggcatcggtccgtccgccgggtggtatagaaacggaataattagtcagcatcgggaaaggacggcccagatcggtatatatcttccgcagggcacgaacgaaagcatcgtactgtccatcaccggaagccgactcctggtaggcttcgccgttaatctctatcttcagggtggcaaccggtttcaatccctgtgccaaagacagcgaatagttcaggatacggatgcgctggtccgccatcgtatcgtgatggagcacatcgctgatgatatacggaaggtcctccgtcgtaaccatttcttttttatcacccagttcgataatccgctcggtaaccttgcgcatagagttctcgtcgatatcgatccccagtgcttcaaggttcttacggatattcgccttaccggaagtcttgccaagagcatattcgcggacacggccgaaacgttcgggcagcaggtcattgcaatacagattgtttttgctgtcaccatcagcatggacaccggcacattgcgtaaagacatgttccccgataatcggtttgttaggcggaatatgaacaccggagaaagtttccaccaatcggctggcataattgatccgttcttcccgaagtgtcgtatccactcccaactgatctttcaacacggcaagcacactgctaagcggggcattcccggcacgctctcccaatccgttcaatgtagtatgaagtccttttataccggcacggacagcagagtagacattcgctaccgccagatcatagtcgttatgagcatgaaaatcgaacttcaagtccggatagcgtgtaaccatttccttacaatattcgtaagtatttccagggttcaggatgccaagcgtatcaggcaacatgaaacgccggatcggcaagtcacgaagcgaatcgactgcttgaaagacatattcaggagagtttttaataccgttcgaccaatcttccagatagatgttcacggcaatccctcgttcgattgcctggttgatgacggaacgtatatcagcaaaatgctgttcgggagtcttacgaagctgttccgtcacgtgcttataagagcccttgcaaagcaagtttaccacacggcaaccagccgcttcgatccagtttaacgaaacatcaccatccacaaagccgagcacttcgagcttctggatgtttccggtacgctccgcccaggaagccacacgcttcacggcctcaaactcaccgtccgagacacgtgcagatgcgatctccagacggtttacacccagatcaagcaatgcctgtgcaatgctcaacttctcatgcgccgcaaaagaaactcccgatgtctgttccccatcacgcagggtggtatccattatttctatcataattgttcatatataacgctacttttagcttgatccaaaagcaacaaactaacgtctcctttcaaatgcttcaatcttttccttattggaaagcagataatcgatgtcatcgaggccattcacaaggcagtcttttttgtaggcgttgatatcgaagtgctcgctcttacccgtagccttattggtgatggtttgggcaggcaggttgacttcgacttctgttttcggatcggcaaaaatcgagtcgaaaagctcggccagaaaaggttcgctaaccaccacagggagaacaaagttattcagttcattgtttttgtggatatccgcaaaaaaactggacacaactacacgaaacccataatcggcaatcgcccaagcagcatgttcgcgactggaacccgagccgaagtttttccccgccaccagtatctgtccgccgtaggtcggatcattcaagacaaacgattctattttgtttccctgcttgtcgtaccgccagtcgcggaacaaattttcaccaaacccttttttgtcggttgctttcaggaaacgagcaggaatgatctggtccgtatccacattctctaaaggaagggggacgcaggttgatgtaatgatattgaatttctgtttcatgaatgttaaaatttatgatttatgatttcagaaaaacgttctcggatcggtaatttccccagtcacggctgccgcagctgctactagtggtccagccagaatcgtacgggcccccggcccctgacgtccttcaaagttacggttgcttgtcgaaactgcatattttcctgccgggatcttatcgtcgttcattgccagacaagccgagcatcccggttgacgtaaccggaaaccggcttcttcgaatatcttgtctaacccttcttcacggatctgcgcatctaccagccaggagccaggaaccagccaggcgaccacatggtcggctttcttccgtcccttagcaatggaagcaaaagcacgaaagtcctcaatacggccattggtacaagagcctaagaacacatagtcgatcttcttgcccaacaaggattcacccggttcgaaccccatatactccatcgatttcataaaagaagctttctccacatcgttcataccctcgacagtcgggatatgttcggtaactcccattcccatacccggattggtaccatacgtcaccatcggttcgatatcggcagcatcaaacagaatctctttgtcaaacacagcatcatcgccacttttcaaagtcttccaataagcaaccgccttatcccattcttcgccggcaggagcattttcacgtcccttaagataagcgaatgtcgtttcgtcaggagcgatcataccaccacgcgctcccatttcaatagacaggttgcacaaagtcaaacgcccctccatcgtcaagctacggatcgccgcaccagcatactcgatgaaatatccggttgcaccgctggtcgtcactttcgacatgatataaagggcgacatcctttgctgtcacccctttccctagattaccttccacacagatacgcatggttttcggctttgcctgcaaaatgcactgggaagccataaccatttccacttcactggttccgataccgaaagcgaccgcaccgactgctccatgagtagaagtatgcgaatcaccgcaaacgatcgtcatccccggcaaggtcagtccacgttccgggcctaccacatgaataataccattcctctcatccatcattccataatgagtcaaaccaaattcggcagcattctttgccagcgtatcgacttgattcttcgaaacaggatcttcgatcggtttatcctgatcgtgtgtcggcgtgttatgatccggcatacaatagatacgttccggacgaaacggcttcaaaccacgtcgacgcatactggcaaaagcctgtggactagttacttcatgacagtacaacctgtcaatgtaaagttgtgtgggcccctcttcgatcatcgtcactacgtgggaatcccaaatcttgtcaaataatgtattcataattatcaattcacttcacaaatttattaattgcatcgataaatgcctctacagaagcggctataatatcggtattggcagcaaaaccataataacggtttccttcgtactcaacctgcatatgtactttccccatatcgtcactgcctttattaatcgcttgaatcaaaaactcctgaatcgtcatcgtacggtggataatagatttcaccgccttgatagcagcatcaacaggaccgttgccagaagcggcggcctcaaacctctcaccagctatattcaggcagatgctggccacagactgcaaaccgacaccggaggtcacctgtaaatattccaacttgatacgatgcatggccgtgcggtctttgccagcaagcatcaagatatcgtcgtcgttgatatctttcttacggtcagccagtttcaagaattcttcataaaccttatctagtttttcctgagacaattcgacgcccaatacctgtaaacggtgtttcaatgctgcacgtccgctacgggcagtcagcacgattgcattatcgtcgattcctacatctttcggatcgatgatttcataactttcacgattcttcaaaacgccatcctgatggatgccggaagaatgagcgaacgcgttacgtccgacgatcgccttattcggctggataggcatgttcatcaggctagacaccatacggctgactccgtaaatctttgtcgtattgatattggtaacaatgtcacgttctttgtgactcttgaaaatcatcgcgatttcttccaaggatgtattaccggcacgttcacctataccgttcatggtgacttccacctgacgtgcaccattcaagacaccctgcacagtattggcggtagccatccccaaatcattatgacagtgggtagaaatgatagcattctcgataccgtctacatgatccatcagatatttgattttcgccccatattcgtccggcaggcaataaccggtcgtatcagggatattgacaactgtcgcgccagctttgatgaccgcttctaccacacgtgccagatattcgttgtcagtacgtccggcatcttcgcaataaaattcgacgtcttccacatatctcttggcatatttggcagcagcgacagctcgttccaaaatatcttcctgattcgaattgaacttatacctgatatgataatcggacgttccaatacctgtatgaatacgtccgtgctttgcatatttcagtgcttcggcagccacatcaatatctttttctaccgcacgggtaagcgcacagattgtaggccacgttacggctttcgatatttcaacaacgctattgaaatctcccggactcgatacggggaaaccggcttctatcacgtctactcccagttcttccagagctttggctacctgaatcttttcaatactatttaactggcaacccggcacttgttcaccgtcacgcaatgtcgtgtcgaaaataaataatctgtctgacatagttcttatcgtcttaaatttgttaatatcttttctgaatgaaaaaagcctctctcacaaggaagcgagaaaggctttttcatatcttaatgccctgtaaagcatacacagtctcacttcctattccgttcccagagtagaataatgtttagagaaataatgagactatttagcattacctgtttcatattgtcttttcaaccgtttttgtttgaacgctgcaaagatacggtctttttccaaacaaccaaatataatttaaagtttttatcactattttcttataaaatagaagacaaatacacctaaattcttcaattcataaccaacaatctacttatcatttttcaaggcttctttatggagaattgatccaccactttcccgtccacatctacgacctgtatttttagttctttcggatcggcagccgctttcaaaatagctgtattggaattgacgataatcgggaacggtgtacgatccgttgcatcctgatggatgaaacggtggaggtgaccacacaacataacgtccggcttggcatcgcgtagcaaaggcatgaacttctgctccacttccaagtttccatgccatccgccgatcggtgggatatgggctacaataattttaaacggcgcgtccttatattctttgctatccaatactcggcgcaaccattcggcctgttctgtccggtattcgtcgtagactgttataccggcatattcaatatcggaatccggcttgtcctctcccgtatccaaaacgacaaaacagatcggaccttgccgaaatgtatagtagatattctcttcttttggagagaaataacgttggaactcggttgcaaaagcgccacgtgtttcgtggttgcctcttgtataatacatcggaatctcagaggcaaacagcttggtcgccgtatccataaaaccgtcgaagatatgattttcctcattgaagactgacaccatatcaccgttaaaaagaaaaaagtccgtctttttcaaatcacacttggaaactaggttcgtcaacaggtcatttttgccatgtatatcgttcaccatcgcaaatgagacggaattatccgcaggatcgctcgtcttgaacaccaacggctttttggagtaaacatcagtcgaggcatagttcccataaatgatcttatgtccgacatggctcagtacttcctgtacgaagacacgataacggtagttcgtacccggtttaagccctttgatcttcacggtatggatcgtagatgtattttttactccgttacgggcatcataatatttgggacgttcggtagcataaaagttcgtatcgtcatccggcgccagctccacccaaccgacagaaggtttatccgacaaccacacgatcgtcacctcatcaggccttagattctgcaaataaggaccatgcaccaaccgaatcttcgactctactgctcctgctaaacaaacagacagccacaataacattactaaaatttggaatttcttcatgatataatatttaagcaattaaattcgaatttatagctacgaagatatcgattactattcaaagatttcttatcaaaatgatacattttcattaaaaaaagtgacaattcataccgaattgccactttctttatgcacccaaataaaaaatgcgatgtctatcaattgttttccgggcgcaatttacgaacgactgcacctgcacgccacatttcgctttcgcgcaatgctgccagttctttttccaaaccttcacgataatccggcttactgttcgtatcgatagaacgctgcgcttcgttaccgcaggcgacctcccggtataatttttcaaatacaggcttaacggcatcgtggaacggccccatccagtctaaagcgccacgctgtgcagtagtcgaacagtttgcatacatccagtccattccgttttcagcaaacagcggcatcaaagactgagtcagctcttcgactgtttcgttgaatgcttcggaaggttcgtggccgttttcacgcaatgtttcgtattgagccaacaataaaccttggatagcccccatcaaagttccacgttcaccagtcagatcggaataaacttccttcttgaatgtcgtttcgaacagatagcctgaaccaacgccgatacccaaagcgatcacacgatcccatgctctaccggttgcatcctggaaaattgcatagcttgaattcaagccacgtccctgcaggaacatacgacgcaaagaagtaccagaacctttcggtgcgactagaatcacgtcaacatcagcaggagggataatattggtacgttccttgtaagtgatagcaaaaccatgagagaaatacagcgcttttcccggagtcagatattttttgatacgcggccagcattcgatctgagcagcgtcggaaagcaacacctgtatgatagttgctctttcgcaagcttcttcaataccgaacagtgtttcacccggtacccagccgtcggcaacagctttgtcataggttttaccagggcgctgtcctacgataacgttgaaaccattatcacgcaagttcaagctctgtccaggaccttgaacaccgtaaccgataactgcaatcacttcatctttcaatacttctcttgccttttccaacggaaattcttcgcgggttactacgttttcgtcaacaccgccaaaattcattactgccattttttctactattaaatgtaatgtgttaataaaataattcttttgtcaggacagttcgcaaaccatccgcccataccatgtttgttcaatgccacataacagcagcacggcaaatcgctttgccttcattacagatcgccatatcatattttccgttatcagcctccctcttgtacaacatgagtttcatcccatatttgccttcagactggtaggcgatttcgaaacgtttgatatcttttgtcttgaacaggtcaagatcaaacaggtctagaagatgttccatatacttgatactgttcaggtggccgttgatatcaaggtcgctgtacttaatgaaataaggaaccccttccgtctcattctccacagccgcaatctttcccggcttttctatcgggcaggggcgatccgtgacataagcgctcaacctggcgatatccaacaaggtcggccggcgtgtttccacatcgatagccgcccaaatagaacgggcgtaaccgaatgtcttaccgttgccatccaccagctcgaaacaacggctggtaaagagacggccgacttcatccacccaggtataaagagttataggttcggacatggctggatattcgatcatttcgatcgccagacgggaaagaacccaagccgtatgccgttctgacatatcgttgaaaccgaatccgcgttcagcagcatggctggatgcgacatgtatcagatagtttccgatcatcggtatcgttacacgtccacgaaaatccaacaggtacggttccgtgacgaaatgaaattcccctattttgcttttatctttatccatgattcttttctgttggggcagttcgcaaaccacccgtacgttattttttttcctgcaacttacgttccatttcggccaacatatcgctcaaacgctcgacacggctttttgtgatcgcaacgcgaccggaacggatgaactgcaagacaccgatcgtttcgctcaactccctgaaaagagcttgcgtctcatcgtaatgaccactcttttcgagaacgacacacgtttcgttcatttccagaatacgggcgttatatttgcgaatcagatcctcgaccgtccccatcttgataaacaactcggtactcagcttataaagggcgatctcctggaaaaccagatcttcatccgtattatagtaagccttcaagatatccacccgtttgtcgatctgcttcacaaccttgtcgatcatatcttcatcggcaaatgtcgtgattgtaaatttatgtataccctgtatggcggaaggtgaaacggaaagcgtctcgatgttcaactgccgacgcgtaaagataatcgtaatctggttcagaagacctactgtattctctgaaaagataataacggtatataatttttttgttgtcatagcttcacctccttacttatctcctaatatcatgttcgttacgcttcctccggcaggcaccatcggatataccataccacacgtttccacattagcgaccaacacaaacgctccgttatggttcaacatctcggcaatagcctcatccagttcctcccgtttttcaacggtgcggccagcgataccgtacgctttcgcaatcgccacgaaatccgggttctccatgatcgtattcgaataacgttcgtggaagaacaactcctgccactgacgtaccattcctaagaaattattattgaggataatgattttcacatccagtttttcctgcataatggttcccaactcctgaatcgtcatctgcatcccaccgtcaccggtaaagaagcagaccgtacggtcaggtgcaccgaacttggctcccatagcagcaggaaggccaaagcccatcgtccccagaccacctgaagtaaccacgctacgagtgcgtttatatttgaaatagcggacacccatcatctggttctgtccgacatccgtaactaaaacagcatcgtttccggtcgcctcggacacttttcgaacgacttcacccattttcaaagatccgttcatcggatacaactccttctcgatcaccttttcatactcttcctgtgcatccggctcaaactcagcattccactccggacgtttccgttcttccaacaacgcagttatcatcggaatggtatgtttggcatttccgagaaccttcacatcgaccggaacattcttcccgatctccgagttgtcgatatccaaatggatcactttcgcctgcttggcgtatgtcttcaaatcgcctgtaacacgatcgtcgaaacgcataccgatggcgatcaacacgtcacattcattggtcttcctgttcggaccgacattgccgtgcatacccaacatacccttattcaaaggaaaatcggaaggcaacgccgatagaccgagaacagtcgaaccggcaggaatgtcattcttcaacaggaatgctttcagctcctcttcagcacctcccaacagaacaccctgtccgaccaggcagaacggtttctccgctttattgatcaacgcggcagccgctttaatccgatcctggttgatatccggttccggctgatagctgcggatatagtctactttcttatattcataatccacaaatccaacctgagcatcctttgccaaatcgagtacaacaggccccggccgtccggtagaagcgatataaaaagcacgtgaaacagcccacgctatctcttccggcttgcgaatctggtacgcccatttggtgatcggttgcgtaatgccgatcacatcgacttcctggaaagcatctgttccaagcaatggagaagggacctgtccggctatgaccaccataggagtgctgtccatcagtgcatcggcaatgccggtgatggtatttgttgcgccgggtcctgaagtaaccaacgtcacccctactttaccggatacacgggcatacccttgtgcagcatgcgtcgccccttgttcatgacgcaccaatacatgcttcaatttatccctgtaatcgtacaaactatcgtaaataggaatcgcttgcccgccgggataaccgaaaatcgtatctactccttcagctatcagtgacttcagcaaagcttccgaaccggttatcttctgtttctccatatctctttattttagtcttgtgtttaatcttctactactctcactccacccttatcggccgaactgaccatcttaccgtaagctctcaaggcttttgagacgacacgctggcgatgaggcggcgtaaaggcttttgtgccgcgggcttcttccgctttacggcgttctgccaactcttcatcgcttaccttcacattaatcgtacgttcagggatatcaatctcgattatatcgccgtctttcaccagtccaatcgctcctcctgccgcagcttcgggagaaatatgaccgatagaaagaccggaagtaccgccactgaaacgaccgtctgtgatcagcgcgcactccttgcctaaatgacggctttttatataagaagtaggataaagcatttcctgcatacccggaccacccttcggtccttcgtgtgtgatcaccaccacatcgcccgagacgacttttccaccgaggatgccttcgcaagccgcatcctgcgaatcgaacactttcgccggaccggcaaacttccagatgctttcatccacaccggccgtcttgaccacacaaccgtccagcgcgatatttcctttcaggacagccaggccgccatctttggaataagcatgctcgatatcacggatacatccggcggcacgatcggtatccagttccttataataggtttcctgcgatcccatccgaatgctgaaacgatgggcgggagcactcttgtatttcttgacagcctcgtccgtcacattcggcgaggtgatagcaaatttatccacggcttcggcaagcgtcattccgtccacacgcttcacattcccgtctaccaagccgtttttcagcagctcgttcatgattcccatgataccaccggcacggttcacatcctggacgtggtaggtgtgcgtgttgggagcaaccttgcagaggcaaggagtcttgcgggagagcatatcgatatcgtccatcgtgaagtccgcctcagcttcctgcgcgatggcgagcaagtggagaaccgtattggtggaaccacccattgcaatatccaatgacatggcattcaggaaagcctgacgggtggcgatactgcggggaagaacagactcatcaccgtcacgatagtatttataggcattttctacaatctgccgggcagcatcgcggaacagttgcgtacggcccacatgcgtagcgacgatcgtcccgttgcccggaagtgccagaccgatcgcttcgttcagacagttcatcgagttggccgtaaacataccggaacaacaaccgcatcccggacaggcattccgttccacctgtgcgatccgttcatcgctgaccgaagtgtcggccgattcgatcatggcatcgatcaaatccagatggcggttatccagctcaccggcttccatcggaccgccggagacaaagatagtcggaatattgagccgcatggatgccattagcatccccggagtgatcttgtcgcaattgctaatgcaaaccattgcatcggctttgtgggcattcaccatatactcgacgctgtccgcaataatatcacgcgaaggaagcgaatagagcattccgtcgtgtcccatagcgataccatcgtcaatagcaatcgtattgaattcggcagcaaagcaacccaacttttcaatctccgcttttacctgctgcccgatctcgtgcagatggacatggccgggtacaaactgggtaaatgaattcacaatggctataatcggtttaccgaactgctcttctttcagaccgttggcacgccacaaagcgcgagccccggccatgcgtctgccctctgtgctgtatgaacttcttaacggattcttcatcatattatttgttgttttcgaacggctcacgaaccgcccctattttcttatcctaaatattattatattaaaaaagcccttctctgtatggagaaaggcttaagaaatatctttatatgacttcacaatttcttgcacacctttctccttacctgctaatgactagaaggaccaccacgagaataatatgcaatacattgttcatcatcttttcttacatctttattattgtttgatgctgcaaatgtagaacaataattcataccaccaaagaaattaaaagaaaaatatcaatttatcttacatttctcaagcaaagaaacaagataggcttgcagtttaacacatccttccaatcttccattatcaaatccgaaatacctgtctggattgtttccgcctaacttttcatatgaaagaatatgcgagtaggcttcaccatcgtcttgctatatattaaaataaaagcagatctttaaggtgaagccagtccgaatgccttccttcaccttaaagatctgctttcaccctgtctcgtacagatttaattataacttcttacgtttttgcccaaggccgaaagcctttttgcctaatggcaaaagccttttcgaccttgggcaaaaagatattcgacgtaggtcaaaagctctatggctttatagcctgacgataaaagtatggcagttgccactctatgatacttttcgtacccgactcatttacaagtgtcagttatttacatttatagacacctataacaggatttttaatacacagtcaatctatttcaggacgagacaaaattaaaagtccggttgtgtaactacccaaatgtcggaatcgaaacagtttctaaatataattcgtatctttgaccccgatcaacagactgaacttatagagataatgaaacaatacaactttgacgagatcatcgaacgtcgtggaaccaattgtgtcaagtacgatcttctaaagaaagacttcggtaacgagaaccttgttccactttgggtagccgacatggatttccggacaccagactttattgtcaacgcaatcaagaagcgtctggagcatgagattttcgggtacacattcgattcggattcctattataacagtatcatcgagtgggtacattataaacataactggaaaatccaacgcgaatggcttagttatattcccggcatcgtaaagggaatcggtttcgttttgcaatgcttcaccaaacctggtgacaaagtaattatccagccaccggtctaccatcccttccgcatcgttccggaaaacatgcaccgtgaggttgtctacaacccgctcaaaacagtagacgacatttacgagatggatttcgagaatctcgaatcggtcattgatgagcattgcaaggtcctgatcctttgcaaccctcataatccaggcggtgtcgtctggaaaaaagacacactggtcaagttagccgaggtttgtgccaaacacaatatactcgttatctccgatgaaatacatgcagagatggcttatccgcaatatacgcatcatccgtttgcaacggtttcggagacagccgccaattgcagcattactttcatggctccgagcaagactttcaacattgccggaatcgtcacctcctactcgatcattcccaatgcggaaatacgagaaaagttctattccttcatggaagcaggagaattcaatgccgggacggtctttgcctatacggcaacagaagcggcttatacatacggagccgaatggttgcaacagatgcggatgtatatcactgagaatgtccgcttcgtagatgaatattgcaaatccaaactcccgaagatcaaagtctatccccctcaggcatctttccttgtatggttggattgccgtgacctgaaactaagccagcctgaactggtaagcttgttccaagataaagccggcctgttgctgaacgacggaagcatgttcggtcccggaggtgaagggcatatgcgtttgaatatcggctgtccgcgttccgacctgtcttccgcactggatgctttgaaaaaagcgatagataagaaataaagtcgtttgcctgtttaattatccagagattgggcagacaagtcggaaattatacgtaaatttgtcaccattttatttatcacaaatacaattacaaatgaaaattacagcaaataagttcgttgcagttacttacgatctgaatgtaggcgaaggcgaagaacgcgaattgatggaaagagcaacagctgaaacacctctgaaattcatctttggtacaggcgctatgctccccgcttttgaagacgctctgaaaggactggaagtaggcgacaaatttaatttttccataactccggctgatgcatacggcgaatatgtggaggaacacgtactggatcttccgaagaatattttcgaggtagacggcaagttcgactcggaaatgatcaaagaaggcaacacggtaccgatgatggattcgaacggcaaccgcatgaacggttctgtcttggaagtaaaagaagatgttgtcgttatggacttcaaccatccgttggctggcgaaacattgcatttcaatggtgaagttatcgatgtacacgaaccgacagctgaagaaatcgcagccctcacagctcccgctggtggatgcggttgtggatgtgacgactgcggaagcggttgtggcgaccataaccacgaaggtggatgcggatgtggcggatgccattaaagaattgacaattgacaattttagcaagggtgaatacatttggaaacatatacaggctgacctctttcggagagtcgcacggtcccggaatcggaggcgtaatagacggatgccctgccggtatcgaactagatacggcatttatccaaagtgaactgaaccgccgtaaaccgggacagtccaaaatcacaaccccacgcaaggaagacgacgaagtacagttcctttccggtatttacgaaggaaaaacgacagggactccgatcggtttcatcatctggaacaagaaccagcactcggcggactacgataatatgaagaatgtttatcgtccttcccatgcagattacacctaccagaccaaatacggaatccgcgacccgcgcggaggtggacgttcgtctgcacgtgaaacgatcgcccgttgcgtagccggagcaattgccaaactggttcttcgccagaaaggtatccggatacaagcatttacctcacaggtcgggaacatcaaacttaacggctcatacacggattacgacttggacaaggcggaagatacggccgtacgttgtccggacccggcgaccgccgaaaaaatggaggctttgatcgccgaagtgaaatccaaaggagatacgatcggcggcgtcatcacctgcgtagcacagggagttcccattggtctgggcgaaccggtattcggaaagttgcatgcggcattgggacatgcgatgttgacaatcaatgccgtaaaagggttcgaatacggtgacggtttcgaagcggccttatatcgtggctcggaacggaacgaccgtttcttcaacgacaacggacacatcaacacccatacgaatcattccggtggcatacagggaggtatctcgaacgggcaggatatttatttccgtgttgccttcaaatcggtcgccaccatcctgatggaacaggaaaccgtcaatatggaaggtgaagacacgatcctgaaagcccgcggacgccatgatccgtgtgttttacctcgagctgtccctatcgtcgaatcaatggcagcaatgacactgttggattttctgcttatgcagaaaatccgaaattgagaattgacaattgacaattaaatgtatcagacaattatcagattgtatttttaattgtcaattgccaattattcatggtgatagggttcattattcagaattgtcatcgccctatagagctgctcgataaagatcaggcggatcatctggtgggagaaagtcattttgcttaaggatattttctcggcggcggctttataaacagcatcgctgaaaccatacggaccaccgacaacaaaaaccaagcgcttcgggactgtatgcgtctttctttctatataggtggaaaactgcaccgatgtaaattcttttcctttttcatccaacaaaaccaaatagtcacccggctgtaatgctttcagaatcaaatctccttccttctctttttgttgggattcggaaagatttttgacgttcttaatatcagggatcacttccatttcaaaagggatataatgaaccagacggttcttatactcattgatcgcttccacaaaatagccggcatccgtcttgccgatcacaatcagcgcaattttcattcgtttacattttagagattgaggacgctaaattacaggaaaaaatacatacctttgcacgataatactcacaaaaagaggaaaaagcttatgaaacgattatttctgacgttggcattggttctctcggttctgagcgtaatggctgccgatatacttcctatatcaaatgcttttaaaggaggcaacgcctcgtcgctcagcggatcaatggacaaggaagtcgatatggccctaccgggttcatccaaaaagtgcaacgcaaacgacgctgtttcaatgctgaatgccttcttcggagggaacaagccgacaggattcacagtcgttcaccacgctgataaaaaagagactggtttctttgtcggtaaactacctacttcatccggtgaatatcgcgtaaacgtgacataccgtgcagaaggaaacaaagcgattatacagtctatcagaattgaataacaagatcttatgatttataccttgtcacatataaatcataaatcataaatcaacagtaacatgaacgtacaagagacaaaagaacaactgattgcggaactgatccgcctggcattcgcagaagatataggtgatggcgaccatacgactttatgttgcattccggctacggaaatggggaagagccagctgatcgtgaaagaagacggcgtattggccggtgtcgaaatggctgaacgtattttccacacattcgatccggatctgaaaatgacgacattcatccatgacggagccgaagtgaagaaaggcgatatcgctttcgttgtcgaagggaaggtacagtctttgttgcaaacggaacgcttgatgctcaacgtcatgcaacgcatgagcggtattgccaccacaacacgcaaatatgtcaaggctctggaaggaacgaaaacacgcgtgctagatacgcgtaagacgactccaggtctgcgtatggtcgagaaagaagcggttaaaatcggtggcggtgtcaaccatcgtatcgggttgttcgatatgattttgctgaaggacaaccatgtggactttgccggcggtatcgaagcggccatcacacgctgccatcagtatctgaaagagaaaaacaaggatttgaagattgaaatcgaggttcgtaacttcgacgagttacaggaagcaatgcgtgtcggcggtatcgaccgtatcatgctggacaacttcaatatcgagaatacgaagaaagccgtcgaaatggttgccggacgttacgagctggaatcttcaggtggcatcacattcgccacgcttcgcgattatgccgaatgcggtgtggattatatctcagtcggagccctgacacactctgtcaaggggctggatatgagctttaaggcttgctaaagacattaaggcgggcggatctcgtctctacgaaatacgcgtcacgacgcccccctctaacaggtattgctgattgctttccgggcatgtggcgatacctttttcattgaaggagaggcgatgcccgtattcgctcacccaaccgatctgacgggaaggattgccgacaaccaaagcgtatggcggaatatctttagtgaccacggcccctgcaccgatcatggcatattcgccgatcgtatggccgcaaacgatcgttgcgttcgcaccgatagaagcacctttgccgacatacgttttcaaatattggtctttacgggaaacggcactgcggggattgaccacatttgtaaaaacgcagctgggtcctaaaaaaacatcatccccgcaagtcacgccggtataaacggaaacattgttctgcaccttcacattatcccctaagacgacctgcggagaaatcacgacattctgtccgatattgcaattccgaccgattgagcatcccggcataatatgggaaaaatgccagatgtgtgtgccgtctccaatcgtgcatccgggatcgataacggctgtttcatgtgccttataagtttccatttacttatatattaagaagattgttggtttcttgctcaaatcaggaacctttccggcccattctttaacaggacgcgtatggatatattcatcttcgcaagtgatattcgaagcaatacacaatttggtcgaagggcggcacgtacggatcaactcctccgccaatttattattgcggtaaggcgtttcgatgaacagctgcgtctggttctccgagtagatgcgcccttccagtttcttgatcgcattcgtacgctgtgaagcatcgatcggcagatagccatgaaaagcaaagctctgcccgttaaaaccggaacccatcaccgacatcaggatcgaagaagggccgaccagcggaaccaccttgtaacctttacgctgtgcaatagccaccacatctgcccccggatcggcaaccgccgggcagccggcctccgagatcacaccgaccgactcgccttccgccaaaggagccagataagcggcaacggcttcggccgacgtatgcttgttcaattcataaaagacaagattgtcaatcacgatcgaaggctctgtctttttcaggaaacggcgtgccgtacgtacattttcgacaatgaaatgacggatggaaaggataacctcccggttgtattcgggaaggacccggcgatgttcgacgtcgccaagcgtgacagggatgagatagagagcggacatgaatttatgatttatgatttatgatttatgatttatgaccatgataaaaaaggcgacatggccataaatcataaatcataaatcttaaatcttacgcaaaagtagtatttttgccgaaaacaagcgaaaagagatggcacttccgatagattttatcacacgtacccgtgcattgctgggaaatgagttcgacagtttcgaagcggcgttgcaggccgatgtccccgtcagtatccgtatcaacgagaagaaaggcactcctgctccgtcgacggccggtgcgccgtgcgaacgggtggcctggtgcgagacaggctattacctgcccgaaaggctttcgttcaccttcgatccgctcttccatgccggcgcctactacgtacaggaagcgtcgtccatgtttctcgaacaggtgatccgcagtcatgtgaaaacgcctgtccgatgtctcgacctatgtgccgctccgggaggtaaatcaactcatctggcggcgtgcctgccggaagggagcctgctgatcagcaatgaagtgatccgtagccggagtcatatactggcggaaaatatcgccaagtggggaaatccgaattgtatcgtgacgaacaacgacccggaagagatcggccatctgacgcatttctttgatgtaatcatcgccgacgtaccctgttccggcgaaggcatgttccgcaaagataccgatagtacaggcgaatggagtatcgcgaacgtcgaactctgtgccggacgcggacgccgcatcatccacgatgtctggaacgcactgaagcccggtggtctgctgatctatagcacctgtacctacaacacggaggaggatgaagagaacgtccatcatataacggaagaactggaagccgaagcactgtccatccccgtgaaggacgaatggcagatcaccggcccgctcaaatacgaccatccggtctaccgctttttcccgcacaagaccaggggcgaaggtttcttcctcgccgccctgcgcaaagcggacggcgagacggaggagatccggttcaaaaacaagaataaaaaagaaaagggaaaaatagttcctgccgtcccggaagcagccagagcctatctgttgaacaccacctccttcacacccgaatggagcggaagtaccctctggatgctccccgaacccgtccgagacgtgtatcccctgctccgcgagcacctgcgcattctttcggccgggatctgcatgggcgaagccaaaggaaaggacttcatccccgccgaagagctggcactcagcacggccctgcgccgagaggcttttcctacggttgacctcgattgggaagacgccatccggtatctgaaaaaagaagcccttctcctccccgacagcaccgaaaaaggctatgtcctgatctgtcataaaggtttcccgctcggcttcgccaaacatctcggcaaccgtgccaacaacctctacccgcaggaatggcgcatccgcacagggtatgtgccggagaaggtgaagacattcgaaatgaaggtttagggacgtgacggccgcttgtgatagacgctattcgcttttcaccacctccgccggattactgttggccgccctcaacacttgccccagcacggtaaggagcaccaccgcgaccactcccgttatcacgccggccaacaaccaccaagggatgtccgtacggtaggcatacccttgcagccaacggctcatggcgatgtaagccaacgggagcgcgaccgcgccggcaagcatcacctgcaccgtatattcgcggaagaacatgcggatgatatcgcccaccctggcccccaccactttacggacagcgacctccttgcgccggcgctgcgtggaggctgaggctacggcataaatgccgaacaacgagatcagcaggcaaacgatcgccaggacggaaaacatcttcaagccggcttgctccgaataattcagacggtcatacatctcgcttaaccgtaccggatgaacatctacaaaagaggcatctatcgcgggcaacactgcgtttatccgccggatcgcctcctgctcctgccccggcacagcacggacatacagactgtttgtcggataaaccgatgggaagaagatcgttggaagaatgcggctacgaagcgaaaagagatggaaatccttcacaacaccgaccacccggtattcttccggctcattcaatgtcatgcggataacggtgcccaccggctcctcaagccccatcgcacggacagcttcctcgttgagcacgacattacgctctccgccttcacccaaccactccccttgaagcatgttgaccttgaaggtttcggcaaaccggctgtcggtcggcacgacacagaatgccgatttttcggattgcgtcttccccggccactcgatatccgtttttatgtcggaaggagtcgcactgtgcttcggcgtaaaataggtatccgtcacattcccgacttgcgggatcgaagccagctccttcaataaggccacccgcacatcctcattaataaaaagctgtatgccggacagatagacaatcccattgcgatcgaagcccagatccttgtgattgacgaaacgcatttgcaacatcaccacccacgcagcgacaataaacaggatactgacagccaattgcaaggtaacggctacgcgttgcaagcccaattgcccggtcgtcttcctttccgcccgcggccggacagccaaccggcttaaccgccaaaaaaggacagaaccgacaaggagcaccaatagcatcactcctactccgcagagggcaaaaagccctaatacccgcggcatctccatcgaaatctccagcaatccggaaaagaccggattgacagccaccaccaaatagcaggccggaagcaacgccaaaagaatggcacaagtcaattcaaacaacatttgcccgataagctgtccgcccgacgctccattcacagccctcagacgcaactcgcgcatgcgttgacgaaaaagatcaagatgcagattcaggaagttaaacaaggcgctgaaaagcaacaacattccggcgacaacgaacaaacgtatgaaattcagtgtaaacggagcctcatccttcagccggtagcgtacgtctcctatcggcaacatccgtatttcgacattctcgttcgccagtgaccgcgaaggataatcacgcaattgaccggcaaggcgaccgacatccgtataaggaggcaacttcgcatacatctgtaaagaggcaaaattccatatcgccttcccggattcatccacaaaggtcttatgcatctttatctgctcatgggaaaggatagcctcaaacgacaaattagtgttgcctggaggatctttaatgactgccgtaacggtataaggcggatcatattgagtcaagcctgtactttttacagactgtccgacagccttttccacgtccccgaacaaacgtacggcaaccgtctccgtcaggatcatattattggcgacctgcaacggatgccaggcgtcgccactcacgatcgtctgcggaaaaacatctaaaaaagcgctgtccgtaaaaagcgtaagcaatcgaacgtagggcgtcccttcggtcttgcagtcattttgatcgataaaaaagacggtagaggtctgcatggcaggaaaccggtcatgcagtttccggtccagaatgcccgacaccatatcgtttgtcttgcctgcctgtttgtcaaacgagtaaacacgataaatgcgatcagcatcaggatagaaaccatcatacgacgtctcataacgcaaccaatagagcgccgggacgaaacaggcaagtccgaaggccaatccgaaaataccggtcagcgactgcgtcttgtatttccacatattgcggaaagcgattttcagataaagtgcaagcatgataccatctaattaaagttacgactcttgaaacaagggcaaaaaacatgccaatacacataattatataatatacaacaccttgcaacaatgcaaggccatcagaagtgtctaattatttgacagcggtgtaaatatattagacactttccaggggattccggccggacggagcagtcacgcctatccgcccgaccacatgtcacgcctatcaaccgcctcccacttcgcttacgtgttgaacaacataataaatatattgatattcaaagccataatccaatataaaaaggtaagtttgccttcaacataaatacaaacaatatggctacaaaaagctacaaatggttcttcgacctcaccgaaaaccttctgacaaaagacgtgacgaacgactacatcgccacagtgaaaaccctccttccgaagacggtcgacaacctcgccgacgacatcgtgaaggaaacggcctacaaccgcgagacagtcatcggcgtcatcaccctgtatgacaagaaaatcatcgaatcggtctgccagggcaacaccgtcaacaccggctcgacgctctacgcaccggccctgcccggctcgttcatcgggacggacggcgtggtggaccgcaccaagcacaaaccgtatgtgaacatcaacccctcgactggcttccgcaaggaactggaaacggtactgcccgtcttttcaggcaacgtgctcgactcaggcggcgcatacatcgggctggtgaccgactcggccaccggacgcacggacggattcatgacaccgggcaacacgatcgacatcacgggcaagaagatccgcagcctcaacgccgacgggtcgggcatcggaagcatcaagttcgtcaatgtcgaaacagacgcggtggcggcaacgatcgcttcgctgacgatcaacgatccggggcgtgtcatactggtcgtcccagccagccttacggatgggacataccggctggagatcgaaacgtattacagcaacaacaacacatttctgaaatctccccgtacattgatatatacacccctttacatcggcaaggttccaagtagcggtggcagtggcgaagatgaaagaccgggagaactctaacggctttcaacagatattttcctatggtagccgtaggtgctcatctatggctgccataggtgggcatctactcctgccataggcgagcggctacggttgtcgtaggtatccaccgacttttgccataattatccttactcaagatcggagaaggaagatccataacagctacattttatttttcagatattcataaatagccaactgtgcccggactttcaccgggttatcatcccgtttgaagttgttatgcagatgttcgtcgatcagacaggctttcacattatcctgcaactgtattttcagaatatctataatgcattgcttgatttccgcattcagaatcgggaaagccgtctctatacggcgattcaagttccggcgcatccaatcggcggaagtcaggaacaaatcttcctcgccgtcattatagaagtaccagatgcgagaatgttccagaaacatatccactatacgagtaaccttgatattcgcactgaacggacggttcggaaccaggcaacaaatcccccggacaatcagatcgatttccaccccgttctcgcttgcgttatacaattcattgatcatattctggtcatgcagtccgttcatcttcaacacgatgcgtcctttacgtccggccttcacgtgctcaatctcccgatggatcatgcgagtcagttccggcaccatattgaagcgggcgaccagcagatggcggaatgtcggtccggccagcttcccttccagcaccgcaaacactttgtttatatcggttatcaattccgcattcgaagtcagcaacgccatatcggaatagatgcgtgccgttttttcattgaaattgccggtactcaaataggcaaaatcccgccgcttgcagccgtcttccgtatctttccgcagaataaccgccacttttgcatgtactttcagtccggggatgctatagatgatgcgaatacccgcctgctccatccgttcggccgtactcatattgttctcttcgtcgaaacgggctttcaactccacaaagaccgtcaccttctttccgttctgagcagcgctgatcaacgtgttgataacagccgaattctccgccacccggtattgcgtgattttgatctcatctactttcggatcaaaagccgcctccatcaggaagcggatcaggtagtcgaaagactgataggggaaatgcaacaggatatcccgttttttcaccgcccggaagacagaacccatctcgtccagaaaaggcacacgcatgggagacgggaccagctgctccagttcttttcctcttggattcggcagtttgatcagatcctgcaaattgttataccgtcctcccaataccagatcgtctgtggtaataccaaaagcattgcatataaacgccaagaaatcatcaggcatattgctgtcatacataaatcggcttaaggcaccgatcttgcgctttttcactttcttacgaatgttttccacgatattcccgcctttctcgtcatccaggtaaatatcggcatcccgtgaaatcttgatgctataacaactctccaccacatagccggggaagatactggacaaattggcccggataatatcgtcgataaacatgatatagtgttttccttcatgcgtaggcaattcgataaaacgaggtactttcgcatacgggattttcatcagggcataataatagtccggcacataatccggctccgccatccgcttgctctttttcaccatccggatcaccagataaagacgacggtcgcgtatgaacgtacggatatcccccgcttgtatcatgaccggcgagagaaaagggaacacctcttcattgaaaaagttatgcacgaattcttcatgaaacggttccggccggctgtcctgatacaggtaaatatcctgccggttcaattcctgcaatactttggagaatatgcgatagtattcgcgctgctgtcggttcacctcttccgtgatttcggcaagcgtctcttcggcttccgccccgctttcttcggtgaagttctttttcatgattactccccggtgctcggcaacccttatttcgtaaaactcttcgagattggacgaatagatcgacaggaacttgatacgctcatagatagggagcgtttcatcctccgcttccagcaaaacgcgatagttgaaggacaaccagctaatatcacgtttaaagtatttatgtgaattctccatcgtattattatcttcggtcggtaaatataaatacttttgtgggataaaagaaattgttatgcttaaaataggacttctttcagatacccacgcctggtgggacgacaagtacatggaatatttctcggaatgtgacgagatctggcatgctggagatatcggttcggacacactggcggcacgcctggctgccttgaaaccgcttcgtgccgtatatggcaacatcgacgggcaatcgcttcggctgcaatatccgcaggtcgctcatttcaaagttgaagaagtaaacgtgatgatgacacatataggaggctatcccggacgttataacccgcttatccggaaagaactgtacgacacccgccctaatcttttcattgccggacattcgcatatcctgaaagtcgctttcgacagaagtttgaattgtttgtatataaatccgggggcagctggtaagagcgggtttcatcagataaggactctggtacgtttcgttatagacgggaaacagatcaaggatttggaagttattgaattggggaaccgataagaaggtgtcaaaacatcttcatcacgatctttcagtaaacagtaatttgttctgacatacctccttatcgattctaacaaccagcacagcagaaattttctgccagcaggaccgtgttttgcaaataagcaaactcctgttcaaaatattcgctgaaaacacccgaacccagattttcttcaatctgtttggaagtccagagctttccgttcggttgtttgatctgatccatgaccttttctgaacgcacacacatcacatacaagttcaccagatgtttcaccttttcgttctcaaatgtgtaccgaatcaggaagcggggcatgacatcttctttttcacccaagccacccattgtttcacgcaccgtactttctatactatgacggaacaaaacatagctgtagaacggatagtcgatcgtatccggagatacaaaagacttcttccctctgtttaccagataaagcattccctgataaataacagccacacgtacgacaggatgataatacttttttggtaacgaacgacttacggatcgagctatgcaacctatcacctttccaccgtcgttcagaacaggtaaccacatttctttccgaaggctgccttgcatcatcgaaatccttatctgttcatatagaatcaaaaatactccgataacgatcccaagctctctgtataaaaaacgctccatacgcacgctctgcatcgtttcgggcagaatactgtataccaaaataatgaacagatgcaatgtataaaggttctggatgagctgggcgacaaaaaagaattcatttaacgtagtacgcatcaatgtccgcttgtaggtcggatgctgagaagtccggatccgccgcaatattgtccgcttggcaaaccccaaaaacgccaataccacaaccaacaacacttctgttatcaacggagaataaataaacaacaccggttcaagccgaaggcaaagaaaaatcgaataaagaactaatgttgtcgcagccggtaacaacaaaaattgataaaccttatccttactcaggatctgaaacaagaaaatacaaacgaaacaaaaggtaacgccgattatgaaggataacaaatatgaaaaataattatccaaaaacataaacagcaacagtggcactaagcctatagcctgattatccaggctcctcttcactttgttcataccctttccaccttttttccctttataacataacaaactgtacagagaaatgttttcgccatcatacgtgtttttcagcgtgataagaggaacggaccagtggagcgctttccacctttttgaaccctttttgtaaagcaattgatttataagactcaaactgttcgggcgtaacgtattcttttaccggaatatttttccggcttggctgcaagtattgcccgattgtcaagacggagacaccggcagcccgcacgtcatccatcaattcgcaaacttcctcgactgtttcacctaagcctaccattataccggtcttggcaacaacgccttgtgcagctatacgcgcaagcacggaaaggctcacttcgtacttcgcggcactacgcacttcgggactgatacggcgaacggtttccatattatgggatattatttcgggagcggctgccaccactttatccaccagttccaaccgtccctgaaagtcggggattaagacctctactgtcgtttcaggattaaccgcttttatcgtacggatcgtatccacccaatgctgcgcacccaaatcaggcaaatcatcccggtcaacagaagtaatgaccgcatgtttcaaattcatcagccggatactttccgccacattcgcaggctccttcgggtccaacgggagcggcttgccagtcaacgtattgcagaaacggcaagaacgcgtacagatatctcccgcaatcataaaggtagccgtccctctgctccagcactctcccatattcggacattttccgctggtgcagatagtatgcagacagtgggattcaacgatgctttttgtccgtgtgaactgttcgttcccacccagccggatttttagccaatccggctttctcaaatgttctgacattataagttacaaattatcaaataaaaagttagacattctggtatacagatgatagcgggtgtttccaccgtaaatactatgattacgatctttgtaaacctgcatttcaaactgtttaccggcttgtaccaagctctcagcataatccattgtctgctggaaatgcacattatcatcggctgtgccatgaatcaacaacaacttcccctgcaaatccttcgccagacggatcggtgaagtagcggcatacccttcaaaattttcttttggcgtacgcatgaaacgttccgtatagacagaatcgtaatatttccaatcggtaggaggtgcaacagcaataccggctttgaaagttccattgccaacactcatggccatcagcgtattgtaaccgccgaagctccatccccagatagccatgcggttcttgtcgacaaacggcaatttgcctaaagcctgtgccgcttccacctggtccttggattccagttcacccatccgcagataggtacatttacggaaggcttctccgcgggctcctgtaccacgtccgtccacacaaaccgtaatgatcccgttagccgccagatattgttcccagtcaaagctatatttatccaatacctgctgggagttcgggccactgtactggaacatcagaaccggatattttttcgactcgtcgaaatcgaccggcttcacgatccatgcattcagttcataatcggaagctgtacgcactttgataaactctttctcggcatatgaataaccagccagcttatcgactaaacgggcattatcctgcaggacacgcaggactttattcgacttcgtctcgtttacggtgattttaaccggcgtatttgcatttgaatattgatttacataataagcgaagttatcgctgaatgtggcattattcgttccttcctgtgtggaaagtttcgtctttactcctttcgcatcgattttatatatagcacgccggatcggactttcttcggccgattcataatagaccgtctttgtcgcttcatcataacccagaaacgcagtcacatcccaattgcccttcgtcacctggcgctgcatgacacccgtaggagaatacagataaatatgcgcataaccatcctgttcgtttacatatgagaaactgttcgcatagaaatggatggagttcaaccattccgaatcgacataagccttattttcatcacgcaggatcaaacggaaaacaccgcttttcggattcgcataatacatattgaaaacattctgatgacggttcaaggtcatcacagccaactgatcgtcattattcgtaaaaacaatccgcggaatatagctgtccgcttctaccggaactttcaattcttttgtatccttcgtcgtcacgtcataagaatgcaacgtaactttcgaattcttctcaccagccttcggatatttataattataatagccgggatataatccctctccgaacatctgcatcgaatattcgggaacttccgattcgtcaaaacgcacaaaagccagctgctcgctgttcggagaccaagccatcaggttcgttacggcaaactcttcttcatagacccaatcggtaatgccattcaggattttattcatttcaccgtctttcgtcacctggacctctgtatcataatcgaatttacgaatccatatattattgtcactcacataagcgaccatcctcccgtccggcgagaatgtcggaatcatctgcttgcctttcgaatctgaaatcggtttcacataattacggcgcacatcgtagtcatacacattcgccttgaatgaacggcgatagatcggttccgtatcgcgccatacaagaatatggtgtccggtactgctaatcgtgtatccgtcgaacttgtcaaacgtacactcacgcgctttctctgtattgaataaagtatcgaccggatttccagtacgataagaatactttataatcatgttgcgagcatcattcatagccgtataatgctcgccatcaggcatagaacgcatttctccaatattagtaacctggcggaactgaccgtctgtaatttcttttaaatcgacacgtttgctcccattctgggctgccaggctcccaaccagcaagaacgaaagtaaagcaccaaaccctaatcgtttcatgtatgattctatttttatcttaatatttcagttagaacggattgcaaagttactacattcttgcggatttattatctttgcccctatggaaaacagcaaaccatatcgtgaattcggagatttcctgcgggaagtatttccttataaagtgcaaaagatatcaatcaatgccggctttacctgtccgaatcgcgacgggacgaaaggtttcggcggttgtacctactgcaacaatcagacgttcagcccggaatattgccatacagaaaaaagtgtaacggaacaactggaagagggcgttcgctttttctcccgcaaatatccggagatgaaatatctggcctatttccaagcctatacaaacacgtatgacgaactggattcgttgatttctaaatatgaagaagcactcgcctgtccgggtgtcgtcggactgatcgtcggaacacggccggattgcatgccggacgcactattggattatttctccactttatcccaaaagaagttcgtgatgatcgaatatggcctggagagcacgctggaccgtactttaacccgtatcaaccggggacatacacatgccgaatcggaagaggccatccgccgcacagcggcccggaacatatacacgggagcccacttgatcttaggccttccgggagaaagcagggaagagatattacaccatgccgacattctgtccgcccttccgctcacaacactgaagcttcaccagttgcaacttatccgaggcacgcgcatggctagggaacaggcggaacaccccgaacagtttcatctctataccgccgatgaatacatcgacttggtcattgacttcatagaacgattaaacccctctattgtcgtagagaggttcgtatcacaatcccccaaagagttgctgattgcaccagattgggggcttaagaattttgaatttacagccaaggtaaataaacgtatttcagaacgaaatgcgcggcaggggcgtctgctcaatcctccttcttcggagccagttctccctggtatgtgatattctgcctattagtcggcgttacgcttatgatcgcggaaccatttgaaaatacttgcatatcgaaacggaaagtatcttctttggtacgggctacgaatttaattcgagcggtccccttcttatcgaaggttgattgataatcggtaattgattcttcaaaacgcatcccgtcacctccaccatacggtaaagaatatgccctaccgaaataaggcagataagaaatcgccgaatcaccgcgcatttcaagagaataaggagtcgtcagatgaaccgtacgtcctcccattggtaacgcccgatctacctcgatcgtaaaccggccgttttctatcatttcctttatttcttttgctttctgttcttccctttccttcttactttgagaataaagggattgtcccccgaaaaaaagaacaatccctacaaaaaagaataacctaatgtttctcatataaccttaaataactaaacactattatttgcctatgtatatataagacaattctaagccttgaaaggtttattcgtttatcattaaattaccttaaaaacaaagacttgattacgatccgatttcaaacattaactacctgcatttgtatatgtcccttaactttgctttatttgtcccttcaattttctgaaacagattaataattttatggagaaaaaacatcagtatcaaggattaaccaaacaagaagtagaagaaagcaggcgccttcacggcgaaaatatcctcactcctccagagaaagcctctctatggagccaatttcttgaaaaattcaatgacccgattatcaagatcctattggtggcatggttcttatccatgattatcgccggcgtacattgttggggaccggaggctaaaggcttcactgccttcctcgaaccgatcggcatattctttgcaatcatgttggcatcttgtgtcggcttctttttcgaagtcaaagcaaacagggcattctatgttttaaacacggtcaatgatgatattttcgtgaaggtgatccgtgaagggaatatctgccaaattccgcgaaaagaggttgtcgtcggcgatatagtcgtacttgaaacgggagaagaggtccctgccgacggacatttattggaagcaatctccctccagattaacgaatcgacactgaccggcgaaccgatcatcagcaagacgacaaatgaagccgacttcgacgaagaagcgacctacccgtccaatgttgtcatgcgcggaacgaccgtcgttgacggacacggtgtaatggcagtggagaaagtcggcgatgaaaccggatacgggaaagtgtatgaaggctcgcagatagaaaataatatcgacacaccgttgcagatgcagctggcagggttggcaaaggtgatcagtaaagccggctatgcgattgctgccatcactttcattgcgctgctgacaaaagtcttgctgtcctcatccgggatgccggtcatggacttgatttcgcacatcctgaatatctttatggtagccgtcacgttaatcgtcgtttccgtaccggaaggcttgccgatgagcgtgacactcagccttgcactcagcatgaaccgcatgctgaaaacaaacaatctagtccgtaaaatgcatgcctgcgaaacaatgggggctaccacggttatctgtaccgataagaccgggacacttacgcaaaaccagatgcaggtatatcaaacgaacttttacaacctgaaagaccagaaattggtagacgatgaactgagcgtgctaatcaaagaaggaatatcagtcaattcgactgccttcctcgatttctccgaagaaaagataaaaacattggggaacccgacggaagcagccttgctgctatggttgaacagccaacatcagaattatctggaaataagagaaaatgatcggatactggaccaactgacattctccaccgaacggaaatatatggcaacagtcgtacaatcatccttattgggcaaacgcgtgctgtatgtcaaaggtgccccggaaatcgtactggcgaacagcaatcgggtggctatcgacgggacctacaaaccggtagaagaatgcaaagccagtatcgaaaagcaactgctggactatcagaaccaagctatgcgtacgttgggattcgcctatcagatactggaagacgggcaggatgccacattcttcgtgaacggacgactgcacaagacggaccttacttatttaggtatcgtcgctatttccgaccctgtccgtgctgatgttccggctgctgtccaaagttgccttgatgccggcatcgacatcaagatcgtgaccggcgacactccgggaacggctaaagagatcggacggcagatcggaacctggaagaccggagacaccgaacgcaacatcatcaccggcccaggcttcgaagccttgactgacgaagaagcgctggatcgcgtgctcgacttgaagatcatgtgccgcgcccgcccgactgacaaacaacgcctggtacaattgttgcaacaaaaaggagccgtagtggccgtcacaggtgacggtaccaacgacgccccggccctgaaagccgcacaggtcggactatctatgggagacggaacctccgtggcaaaagaggcaagcgacatcacgatcatagacaactcgttcagtagcattacccgtgcggtgatgtggggacgttccctgtaccggaacatccagaaattcctgttgttccagttgacaatcaatgtggcggcctgtctgatcgtcttattgggctccctgttaggaaccgaatctccgctcacgatcactcagatgctttgggtaaacctgattatggatacatttgccgccggtgcactagcttcgctgccgcctaacgaacgggtgatgaaagacaaaccccgccgaagcggtaaggacggcgactttatcattacccgcccgatggcttacaacattttcggtgtcggcctcgcattcgtaatcgtcttgatgggattgttgctccgcttccatgcacaggatggactgacaccgcacgacctatcctggttcttcagtttcttcgtgatgcttcaattctggaatatgttcaatgcaaaagcgtttatggaagaccgctcggcattcgccaacctcaaagagagtaagagtttcctgatggtggccctgcttatcatcgccgggcaatatctgatcgtcacgttcggcggcgagatgttcagtgtcgttccgttatcttggaaagactggggaaccattatcggctcgacttctctggttctctggatcggagagataggccggttaatcgaaagatggagaaaataaataaaaaaagagggttgcgccaaaaactgacgcaaccctcttcacttacatctaaatcattaacagagattcttacttcttgtaagtcttatacccataaacagccaagtcacccaactcttcttcaatacggagcaactggttgtatttcgccatacggtccgaacggctcaaagaaccggttttgatctgtccgctattggtagcaacagcgatatcggcgatcgtagcatcttcagtctcacccgaacgatgcgaagtgacggaagtataaccgttacggtgtgccatttcgattgcatccagtgtttcggataacgtaccgatctggttcaccttgatcagaatagaattggcacagccttcctcaatgcctttcttcaggaattctacgtttgtcacgaacaggtcgtcaccgaccaactggcatttgcttcccaacgcttcagtcaacagtttccaaccggcccagtcgttttcgtccatgccgtcctcgatagagtcgatcgggtatttagcaaccaattcggacaaataagcgacttgctgctcggcagtacgcttagcacctttggctccctcaaatttcgtataatcgtatacgccatcatgatagaattcggaagaagcacagtccatagcgatcgtcacatccttacccggctcgtatccggcagctttaatagcggccatgatggagttcaaagcgtcttccgttccatccaaagcaggagcgaaaccaccttcgtcaccgacagccgtactcagaccgcgatcgtgcaacaccttcttcaaagcatggaagacttcagcccccatacgcaaaccttcacggaaacagcaagctccaaccggacggatcataaattcctggaaagcgatcggggcatcagaatgcgaaccgccattgataatattcatcatcgggacaggcaatacatatgcattcgtcccgccgatataacggtaaagaggcaggtccaaatagttagctgccgccttggcaacagccagagaaacgcctaacatggcgttggcgcctaaattagactttgtcttcgtaccgtcgagttcaatcagtttatggtcgacctcacgctggttcagggcgctcatgcccaggatagtgggagcaattacattatttacattatcgacagctttcagaacgcctttgccaccatagcgttttttgtcgccatcacgaagctcgattgcttcgttttcaccggtagaagcgccggagggaacagctgcacggccaaaagcgccggaagccaaatgtacatctacttcaacagtcgggttaccacgtgaatcaagaacttctcgtcctactacttttacaatttccatacttttactatttgagttttatctttcgtataaatataacaaaagaggacgaggctttgttggggaaaggggatcaatattgtctatcgccccatttacaacgacatcgacaattcgatccgacatcctaaagcgttcattatgcgatagaatgtttatacataacgaatcccaaaaggaaatgccacctcccctactttttccgaacaaaactttccggctttcagataaacgattatctttgttacactatccggcattggatagcgacctaaaacctgtcaaactatgaaatcagacatgtttattgatccgaaatcggattacgcgtttaaaaggtttttcggcactgtgtcgaacaaggagcttacaatcggcttcctgaacagcctgcttaacaaggatatcaaagatatcatattccacaacgtggaaatgcaaggcaacaatactgatagcaggaaagctgtattcgatttgttttgtgaaggatcggatggagagcttttcattgtcgaaatccagaaaaagagacaaaagtacttctccgaccgtgtactttactacgcttcgtttgttatacaaatgcaggctgatatagaaagcgagaagttccggttggcaaaggaggaggagagaagacggtggaactatcatatcaacaaagtgtatgtagtctgctttttggacttccggctcgatacgcgctacacagacaaatatcgttgggatgtcgtgcgcatggaccgtgaactgaaaattccgttcagcgaaacactgaatgagatctacttggagcttccaaagttcaacttgaactttgaggaatgcgatacgttttacaaaaaatttttatacacgatgaacaacatagacattatgggacagttatcaaaagaaacaatacaaaacgacaaactcctgcgaaaactcaaaagcgctatcgaactacaacgcatgagcgctaaagaacgcttagcatacgaactaagcattgcagccgaacgcgacctggctgcctgcatggctacaagttttgaggagggggaggaaaaaggaatagctaaaggcatcaccgaaggaatgcgcaaaatcatcttgaacatgaagcaagcaggcatggatcttgccaccatcgccaaaactgcgggactgccggaaaaagaggtagaggcgctattgaaatgaattacagccttgaaggatcaagatgaactgcaacgtaataatataacgaagcccttgcaaccaaacgattgcaggggcttgttttttgtctgcctccggtcttcacagagggaagggcagaagaactttttataatttcattaactttagtattaatattcaccgtttgttccccctcgcggggtaattggacgctcccaggcaatggcagcaaggccggctatccgggaaataccgcacggtgatatttagaattatttgattataaaatgtcatatgtctctgtaggggcggggttctactccgcccttaagatagacagtattgttttttagtatcaaccgttatttaacgatagcctttacagcttcttcaccttcaacagctacaactacgataccctgcggagcagcgattgtagcgttgtcagaagaaacaaccgtgttagccactacctggcccaagatgttgctgatgacaactttcttgccggcagcaccggcgattgttacgttgccttcgccagatacaactttaactgttgcaacttccacgtcctcgttagctgttgcatcgcctttgcccaatgtaacaaccagagctttttccacctgatttgtaaagcctaacttaccattcaggttgtacagataatagttcggagcagaaatcggtctgattacatagctgctttcagaagccttcataatgtagaacttgaagttatcaacaccacccaggcatacatcttcttcttcctcttctgcaaccaaaacagactcaccgtttacagtcgtagagattgtgtcgataccagccaatgttgccggacggaaaattgctttcaaatcgccatcacgtccatctacttctgtataagaaccttccaaagcatagtttacattatatacataatcagccttgttagcatcccaatgaagcatagaatccgttgcgaaatacaagaagtctcttgcttcttcttcaccattacctttagagatatagaaagaatggaaatccttgtcgatatcagctgtatccaaccagaatgtcataccttcgccgataataccttccaagataccgttcttgttctgtttcacagcaacagcaccttcttcgctattgaatgtagcgtgacgtgctacagcttccaatgattcagaaagagcgttaaagtcaaccgttacagctgaataaggagcattcagttcatccaaagttgcagaagcagcgtcaaaaacagcagttgttgtatttacagaccatttgttagcatcatacttaatcagaccactgtaatttacttcatcatttccagctgtaatatcagttttgcccaactcaatcatagcatacgttccatctacatttttcttgaagaatacacgtttggcatcgtctttagcagttgcagctttataatcactagtaacaccaccaaaatactgcttagaattatcgttcttcaaattgtacagcaaataagaagtcgcaacgtttacaacagagtctttctgttttacatctgttccgtccagataagcatatttcatcttattttttacgctttcagccttttcaaacatccactgaacgctataagccggattgttgataggaacaaagtaaggactagtacctttgtaagccatgtacagcttttcaaccgttaccgaaccagtaccgttgaataccaattcagtctgctggctcaactgtgcatctgtcaatgccaagaaaccttcgctttcagttgtcggagtcagtttgacaatctgatatttccagttactaatatcggtcaagtccacagaacctgcaacaatacctgtaacagcagtacctgtgctcaatgcagcagtactgattgcatattcgccagccttgtcagtcttatacatgctgacagtgaaagtcacgtttgtttcacggtttttgaattcgaagttacgtccactaacagcagaaacaacccactgagccaacggagcatttacatctacatcttccggagctgctacggctgcgccgaatgcagcagcaccataagtcgggatcaaatatttgccatacaaagaagcagcagcagtagtgttagccggcttagttcccaagaaagagatgttgtagatagcagcatcgtctgctttcaatacgtcagcagcagcagcccaagtgttgcttgttgtcatagccaaagacagtttgtcggcgttaccgaaaccaacagtcgtgatataagtcttgataccacctgtagtcaaagagtaagcacctacaaacaagtttgaagcagccgtgttgtcattaccttcaactttagcagaagccaatgtaatcgtatattcaccttctgcattctgaggatcgtcttctgaaacagcaaaaacaccgttcacgcttgcaactttaccatctttcttaacgttgttatcggccaacttgttaccttttacagttgtaaagtcgtagccttcaccagttgcagcatccaagcctgtgataccaaagttcttttccggattcaatacgataaatgtggcagcttcaacctgtgcttttgtaaagccagttgccaacagtttcttaccggcagcgtcagctttaacaaaatacataccagatgttgcaggagtagaaattacacttgtagtcaatgcaccatctacagtagatgcatctacagcaatcatctgatctgcaaacggattgacatccggatcagaaactgcatttgggaatgcaaacttgaagccttgaccggaaaggttggcgttcaaatcatcgacagtgaggtctgttttagcaacccatgctgtagctgctgtagctgctgttcccgcagcacttacatcatatgtcgtagcgacagttgaattaacttcaaattgaccagccaaattcaaaactgaaagttttgtaaaatccaatcctttaccttctacagtaaagatgtttgtaacagttgcaacatctgtcacattaccacttaacgcattaccatttgctttcgtcacataaaacggttttccattagctttcaatgtaaacgtagaaaagtcaccaattgcattgtaagcataatcagcaatttcaaacaaagcagcattttcgatagcaacatcacctgtagcattataagtggaaacagacgttccatttactttgtaagtttgatctactttgatgaaaccatttgtgttacctaagtagaactttgcaccattctgcagatcaccttttgcggcttccgctgtaggagcagcgtttgcagaaccaaacaacgcacctaccatcagtaagcccgctgtcaaaagagtagaaattctcttgttcataatctaaactttaatattaataatacaataattgaaatgttcgtcctatatatatgtacacgcgttaataatgtacacgtgttaactttcgtattttgatagcaaaaacgatcgtttttttcgtcatttttttcgcctctttttggagttcgtgttgaaaaggtggttttttgtccttaaattgctatctgattgataagaaaggatatagagataagattttttttcaggaaaagggttgtggttttaaaaagtatatgtatttttacatccaccaaatagctcatccacagagatttatctacaaaaacagcattctaaaaattcattaataccactttcgttcaaaaatcggtgctttttagggaaaaccccgatgcctactgtgtttcgaaagggtgcttgtccgtcattgacccgatgcttaccggtctgttttttgaagtttttcggattttcagtgaaaaacctgccaaagtccgccaagtctgccggggcctttttaaatttcgacgacctgctttccccgttccgtcttccggtaataaccatttccttctgagatgattaggtcatttttttgcagtttccgaaggaatttatcgacagtcgattctgaaatttcacggacattcgcttccttgaccacgtcaatgcgtttgaaagaatcaagaagggagacaaacaagttgcgcaaatggtgtggaaaccggaagtgcacttccgacgaagcactctgcaacgatgtagccacgacataggcatgttgcagacaaaccttgccgagatggaaggcggtggcgaaatcatcgtcgctgatcgtccagacacgctccgagcaaccactctcgcccttacgcaacgcggtcagttgcattcctatgcgaaaaatagccagacgatagcgcaggaccgtcgactccatgtcttcgttaccgaaagaacggacattgtagtactcgcgctcgaaaaaacgatcgaggcgtttacgttgggcatcactaaatttgacccaggtcggagagttgtcgagaaaaactccgatatcgagcacacgctgcccccaactttcaaaatattcggatgctgccgggctatcgtcggccgaagtcaacggacgataggtcccgcttcccggtatgcggtacatcagaatacggctgaagagaccgttttcggtcgaagggatcaggcggggaagcatggcaggagtaccgctcagcagtagtgccaagttgggccgtttgaccataaacgatccgctgcttttcgtcgagctgcctacaggttcatgatgatacgacttgttcagcacatcgttatatttgccaaaatcctgcgagaacatgctcaagaccgtctccatctctgtatcgaccatgcaggatgtgtaaggatagttggcttcgagcagttccacgagccgggcctgcgtgacgttacccgtcagcgcaaggtttctctgtttcaccaccttcggctttgacggagccggaccgagcggctgtttggaggtctgtttctgacgtttatgcatcttgtagttatcgtatgcttcctgcaactcttcatattcttcaacctggtgacgagaattgtcataaatatactgttgccagggttcgagcatccgttgcagggcagcgatacgccctttcccacttccagaaccgccggttatgatcgaataaaaggcaggtgtgtaatcgtgttcgcccaacgaacctttgacaccaggagacacgctgctcagaagcgtcagcgaagaaatcagcaaaatgtcgcgatccgtacgactgtacgcacatttcaatatgtccgtgagaagaggtggtaagtgatcgtagatattctcgtcaaagcaaggaagaagggtgttatccagctctatatcatcacattcgccgtattctgcatccttttgtgccattttgggaaagggggtggcagacttggcagatttggcagacttcgggacggaactggtcccgtccggacggaacgcacagctcccatgcgaggcactgtagcgtcggtagatgtcgtttactgttgtctcgacctcggcagccggaaagtcggccgaaccgtagcggcggacacactcactgacagcgtcgtagagagaaaagccggcattgttcaagacagaggacagctttacaagataggaatgacggttaccggcaacaaaagtattgctttgttcatacttgtcaatgtagttcgaaagccgcgtgccggagcacacgcttccggaggaatgtccggaagcggcctgaggctccgggtcagcaacggggatttcgatcgcttcagattcttccttataaaaagcgttcggatcatggccggcgaaacagccacggttcggatcttttccactgatgtccaccttcacgcccggaagatccacttcgacacggtgtttgacgatttcaaaggccaagttatgatttttcaaatcactgtcgaccattatgaagagcttgacgccggtcccggaagggctgacatgaccggctttcacatacgggaactcagccgcccggcggagcaattcaaggacgggtataggcgaatcgtctatatcgatcactatgcaagcactatagcgcgccatgtgttccaacttacgacctccttccatcacgccgccggcgacatagaggggcagttttttcttgtaagcatcagcttcatccttcttgccggctttgataagcccacgcagataggcgatcggtctcgcatactcaccactcttcaccttaccgatgtactgattcaaggtcatcaaactggcgctccctgtctggaacgcagagtcgaagtaagtaccttcgacttctttttgtattaccatactattgtgtattaaatgaaaggctacagttcccgcaggaacgcttcgtgcggctctttcggttgtttattctttctaaggttcccccaagtgctcaaccaggcaggcgacctgcttcggcgtataaagtttctggaatttcacccatcccgcagccaaaagtttttctttcagaccacgcgaagtccgtatccatacccacatccttttataggcagtctcagggggagattccgggaaataaaggagcgcaaattcggtaacacccatggctccttttgccgatataagctctatttttttatcattcataataattttgatttaaacattctaatacattataaatgtacgacattttttggtatcatgcaaggaatccgacaattattttacaaaaaaaacaagaaatacctccaaaacctcagcaaaccgtatatacctttcccgccagacctcaggacaccgtatctttgtaatgtagtaaatcactaacccttaatctattaatcgtatgtcagtaaagtacaaacttgttttaaaaaaagacttgaccaaaggtgcggcaaccgatgccaagcggtattatgcctcggccaatgtcactggtatgatggatttcgacacgatctgcgatgtggtggcagaccgttcaacagccagcgacggtgacgtggctctcgtcttgttgggactgatccgttgcatgcaggaagcgttgttgcgtggcgaagtggtccaattgggtgcattgggcaacttccggctctcactcggaagctccggagtggtaaatgcggatgattttcacgcatcattgatcaggaagccgcgaataatctattctccgggagttaagctgcgcgaaatgatcgccaaagtgagtattgaacgtattggacaagagacagataagtccaatgcaggtggtgaagatgacagacccggagaattatgaaaccagcgcaaatcaacttcgtaaaagaatgcctaccggcagctgtgtcggcaggagccgccttcaacctgaatccgctggtcattctggcacaggcggcgtttgaaagtggctggggaacgagcaatctggcaaaggagtgccgaaactatttcggactgaccgcctatggatgcagcaacgcttattggcatggcgggaaaactaccgtaaaggcatcctcctatccattgaatttccgacgctacgacacacgagagaattccttcctcgatttcgcccgcttgatacggaacaattatcgctccgcttggcaggtaagcaacgacccgcaggcctatgcaaaggagatcgcctacagtccttacatcagcgaactgaacggcgataatcgggaaacgtatcggcacagtatcatccagatcacacaaacgatacaggcggtgatggcgttaatcggagaataacggttcaaccgtatgtcataccaaacaaccaccccatagggaggggtcaaaactatcctgttcccgcgcttgacacgggatcgcattaaaaccgacgctataaaaatctgattgataaggtccgtctttttgcgaccccgcatcaagtgcaatgtattataaactctaaacgactatccatcatgaaaaagatcagaaaggttcttgaatttatcttggctttgttgaattttttgttccactttaaacctgtaccggatgaaacacctcccatcagccctgaaagttttcctctccctgattatcaggatcttgagaagaggaatgaacctctatttgagactgtctgttagggtcaggctctggtaaaacgcaaaaagcccgtctgcgaaaggcagacaggctttttttatttgtttgttgaataagccggaatttattcagcagctttttcttctgcaaccggtgcttctgcaacaggagcttctgtttcagcagcagctgtagactttttacgagaacgtcttgtcttagtcgctttcttagctgtagctgtcttcaacatgttttcgttgtaatcaaccagttcaatgaagcacatggctgcgttatcacccagacggttaccagtcttcaggatacgagtgtaaccacccggacggtcaccgatcttctgagatacttccttgaacaattctgttacagcatatttgtcttgcaaattgctgaataccacacgtcttgagtgagttgtatcctctttagacttagtgataagcggttctacgaacttacggagcgctttagctttagcaacagtcgtaaagattctcttatgcttgataagagaacatgccatgtttgaaagcattgcgttacggtgagtgttcgtacgacctaaatgatttattttcttattgtgtctcatcgctatacttactctttatctaatttatatttagtgatatccataccgaatgaaaggttcagactctcaagcagttcatcaagttctgtaagtgacttcttaccgaagttacggaatttcaacaggtcattcttgttgaatttaaccagttcacctaatgtttcaacatctgcggccttcaagcaattcaatgcgcgaacggaaagatccatatccgagagcttgctcttcagcaactgacgcatgtgaagcacttcttcatcgaattcctcattaccgtcagtgtcaactgtctcgatagcaatcttttcatctgagaacaacatgaaatggtgaatcagaatcttagctgcttcttttaacgcttccttcggatgaatagaaccatcagtggctatttcaagaaccaacttttcgtagtccgtcttttgctcaacacggaagttctcgatcgaatacttgacgttgcgaataggtgtgtaaatagagtcgattgcaatcacgtgcatgtctgcattcggatctctgttttcatcagcgggaacatatccgcgacctttgttaatcgtcagctcgatctggaaacctgcgttcggatccaaacgacaaataaccaactcaggattcaatacctcgaatccggtcagctgtttaccaatatcaccggctttgaacacttccgaacccgaaacagtaatacttactttttcattctctatgtcgtctacaatatgcttgaaccgtacttgtttcagattcaagataatgtttgtcacatcctcgataacaccggggattgtaccaaattcatggtcaaccccttcgattttaatggatgtaatagcaaaaccttcaagtgacgacaggagaatacggcgcagagcattacctatagtaataccatagccgggttccaacggacgaaattcaaactttccgaagaaattgtccgcttccaacattaatactttatcgggtttttgaaatgctaatatcgccatggaaatcaattattatttagaatacaattctacgatcaactgctctttaatgttttcaggaatgtcagctctttccggcagatgcagtaattttccgcttaaagaagactgatcccattcgatccaaggatacttgctgtggttgaatcctgactgtgcgtcggcaatcacttcaagagatttggatttttctctaacaccaataacctgaccggcttttacagagtaagaaggaatgtttacaaccttaccgtctactgtaatgtgacgatgagaaaccaactgacgggcagcagcacgcgtcggggcgatacccaaacggaatactacgttatccaaacggctttccagtaactgcaacagcacttcaccggtaataccttttgaacgtgatgccttttcaaacaggtttctaaactgtttttccaatacaccgtaagtgtatttagctttttgcttctcacgaagctggattccgtactcggaagtttttctcttgcgggcatttccgtgctgtccgggaggatagttcttttttgaaagaactttatccggtccgaatattgcctcaccaaacttacgggcaattcttgttttaggtccagtatatcttgccatttttttattgttttaatgttctgttctgaatctggaaccgtgcagccgcgactacagagaggataaggtctttgtgtaatctattcacaattccggattcaatgttcaagaaactatagttaattatactcttctctttttcggaggacgacaaccattgtgaggaagcggagtaacgtctacgatttccgttacttcaatacctgcaccgtggatagttctgatagcagactcacgtccgttacccggtccctttacgaatacttttacttttctcaaaccaagatcgtaagctacttttgcacaatcctgagctgccatctgggctgcatacggagtgttctttttagaacttctgaatcccatcttaccagcagaagaccaactgattacctgaccttcgctattagcaagagatacaataatgttgttaaaagaagaatgaatatgagcttgaccgtaagcgtcaacttttacgtttctcttctttgctgcgactgttttctttgccatatcaattcttattatttagtagcttttttcttatttgcaacagttttcttcttacccttacgagtacgagcattgttctttgtgctctggcctctcaaaggtaaaccaatacggtgacgaacacccctgtaacatccgatatccatcagacgcttgatgttcagctgaacttctgaacgaaggtcaccttccaccttatattcagcgccaatgacttcacgtacttttgcagcttgatcgtctgtccagtcttttactttgatatcacgatcaatccctgctttgtctaaaatggattttgaagcgctacgaccaataccataaatataggtcaaggcaatttctcctcttttattttgtggcaagtctacaccaactattcttatagccatattacttacttaaattattttgcaaaaataataaattatccttgacgttgtttatacttaggatttttcttgttaattacgtataagcgtccctttcttctaacgattttgcattcgggagtacgcttctttaaagatgctcttactttcatatcttgttgttttttttatttatatctaaaagcaattctacctttcgatagatcatacggagacatctcaactcttactttatcaccgggaaggatctttatgtagtgcatgcgcatcttccctgagatatgagcagtgatttcatgtccgttctctaattctacacgaaacattgcgttcgacaatgcttctactataactccatcttgttcaattgctgactgtttagccatataaaattaaatcaaattaaattgcattattacctaaaacttcttctaaaaactcgaatgaagacaagatctgggggccttcgggacggattgcgatacaatgctcgaaatgagccgaacactttctatctttcgtacggaccgtccaaccatctttctcaaaaacgacattcttacttcccatattaatcatcggctcaatgcagatgcacataccgctgcgcaataggggaccgcaaccaggacgcccgtaattggggacttcaggttcttcgtgcatcttccgtccgataccgtgaccgactagttccctgacaacagagtaacctttcgattcacaataaaactgtacggcatggctgatatctccgaggcgtttgccttcaatggcatgctgaattcccaagtaaagcgattcctttgttgtcttcaacaaggctttcactttgggatcgacttcgcccacacaaaacgtataggctgagtcaccgacaaaaccattcaaaaccgtaccgcagtcgacagatataacatccccttctttcagtattgtcttcgaagaaggaataccgtgtacaacctgttcattcacggaagcacatatggaatttgggaaacctccgtatcctaaaaatgccggaaccgcaccattatctctaatgaattcctcggcaatcttatcaagctgaagcgtattgacaccgggagcgatatgtttggccaattcgccaagcgtcttacccaccagttgattcgccgcacgcatcaactcaatttcttcatctgtttttaaatagatcattctaattaataagcaccaactgcgcctgagcgacctttaattcttcctgacttcaacaaaccgtcataatgacgcatcagcaaatgactttctacttgctgcagtgtgtccaacaccacaccaaccaggatcaacaaagatgttccgccaaagaactgcgagaactccatacttacaccggcaatccgggcaaaagcaggcatgatagccactactgcaaggaaaaatgctcccggcaaagtaatacggtccatgatggtatccaaataatctttggtactctttccaggcttaacacccggaatgaacccgttgtttctcttcaaatcatccgacatctgagtcggattgatcgtgatagctgtatagaaatatgtaaacaagataatcagtacagcaaatacgaagttgtaccaaaatccggtattgtccataaatgcagctacgaaaccagactgttcgcctgtgcttgagaaaccaacgattgaaataggaataaacatgattgcctgagcaaagatgataggcatcacgtttgcagcattcaccttaagaggaatgtactggcgcgcaccaccatattgtttatttccgatgatccgttttgcatactgtacgggcactttacgagtaccttgtactaacaggatcgcacctgcgataaccagcaaaaggaacaacatttcaaacaagaacataaccagaccaccggttttctcactcgtccgggaaacaaattcctgaaacaacgaatgcggcagacgggctataataccaactaaaatgataaatgaaataccatttccaacacctttatctgtaattctttcaccaagccataagataaacatacttccagcagctaaaataactgtagaagaaattgtaaaccatatacctgcaggcagagctgctccggcggctttcagttgtacacttaagttaacaagataagtaggaccctggaacagaaggatagccactgtcagataacgagtccactggttgatcttacgacgaccactctctccctctctctgcaatttctggaaagaaggaactgcaattgccatcaactgcattacaatggaagcggagatatacggcataatccctaatgcaaaaatagaagcattagagaaagcaccaccagagaacatgtccaacaacgccagcaatccgcctcttgtctgttcctgcaaagcggtcaacgctttaggatcaatacccggaagaacgacgtacgtaccaaaacggtatatagccaccaataaaagagtggtgaggatccgatttctcagatcctcaatcttccagatattttttattgtttcaactgctctcataacttagagtttaacaacagttccacctactgcctggatagcagcttcagcactcttggagaaagcgtgagcttccacttcaagtttagctgtcaagttgcctttagcaagaatcttaaccaactgggaagaggaaatgaaacctgcttcaatcagttcgttgatgccaatcttagagagctgctgagcttcagccatgccctgtaatgtagaaagattgatagctttgtattcaacgcggttaatattcttgaaaccaaatttaggtaaacgtctctgtataggcatctgaccaccttcgaaaccaattttctgcttgtaaccggatcttgatttcgcacctttatgacctcttgttgaagttcctcctaatcctgaacccggaccacggccgattctttttctggtcttggtagatccttcagcaggttttaaatttgataaattcatatcgtataatttatttttcaaccgttattactttactactgaaaccaaatgtttcactttctcaaccatacccagaatagccggagtagcttcatgttctactacctggttcattttcttcagacccagcgcgtcaagagttctcttttggtctttcgggcatttaattctactttttgtctgcttaactttaatagttgccataacttattatcctccctaattaacctttgaatactttttcaactgcaacatttctgttctgggcaaccatcaacgggcttcttaactcactcagtgcagcgatagttgccttcaccaagttgtgaggattagaagaaccctttgacttagccaaaacgtctgtgatacccacactttccaatacagcacgcatagcaccacctgctttaacaccagtaccatgagaagccggtttgatcagtacctgagcgccaccaaacttagccaactgttcatgaggaatagtacctttgtgaacaggaactttaatcagatttttctttgcagcttcaacaccttttgcgatcgctgtcgttacttcaccggctttacctaagccccaaccaacgataccgtcttcgtttcctactacgacaatagcagcaaaactgaatgtacgtccacccttggttactttagttacgcggttgattgcaaccaaacggtccttcaactctatgtcgttggtcgacttaactctattattaactcctgccatcttcattaaaatttaaggccgccgttacgtgcagcatctgctaattctttaattctcccgtgatacaagtaaccgttacggtcgaaaacaacagcctgtacaccagcttgctgggcaactttggcaatctgttctccaaccttggcagcaatctcttttttcggagctttaacatccatcttcaaagaagatgccgcagccaaagtcttacctgtagtatcatctataacctgtgcatagatctgcttattgcttctaaacacagtcaggcgcggacgttcaggagtccctgaaattttaccgcgtacacctgcttttatctttaatcttctttcttccttcgttgtcatgataatttcagtttacgtagattacttacctgctgatttaccagactttctgcgaatttcttcacccacgaacttaatacctttacctttatacggttccggcattctgaatgaacgaatcttagcacaaatctgtcccagtaattgtttatcagccgattcaaggataataagaggatttttatttctctctgcctttgtttcaactttcacttccttaggcaactgcatgtagatgttgtgagtataacctaaagaaagatctaacagctgacctgtatttgtcacacggtaaccgacaccgacaagttccagttcctttttgtatccttctgaacaaccaaccaccatattgttaatcagcgaacgatacaaaccgtgcagcgcacgatggttcttttcgtctgtcggacgtgtcagatgaatgattccatcttccaaagtcacattaatatcaggattcacagcctgagtcatctcacctttgggaccttttacagtcactacattatccttaatggtaaccgtaacaccggccggtacatgaattggtaattttcctattcttgacattcttctttcctcctaattaataaacataacataatacttcaccaccgatcttcagatcacgggcttctttgtctgtcatcacacctttagaagtagaaagaacggcaatacctaaaccattcaatactcttggcatttccttgtaaccagtgtacttacgcaaaccaggggtagaaactctctcaagtttcttgatcgcatttactttgtttaccaggtcatacttcaaggcaatcttaattgtaccctgaggaccatcttctacaaacttaaaattaagaatgtagcccttgtcgaaaaggatcttagtgatctctttctttaaatttgacgccggcacttcaacaactctgtgcttcgctttgatcgcattacgcaatcttgtcaaataatctgcaataggatctgtcatatataaatgaattaaattgatccggccacccggacaatatttaaattaaaaaaactcttaccaacttgctttctttacacccgggattaaaccatgagatgccatttcacgcagttgaatacgagaaataccgaactggcgtacatagcctttcggacgacctgtaattttgcaacgattgtgcaaacgtacaggagaagcatttttaggtaaagcctgtaaagcttcgtagtcacctgctgcttttaattctgctcttttagcagcatattttgctacgagctttgctcttttcacctcacgggctttcattgattcctttgccataactacttagtctttttttgcatttttaaaaggcaatccaaattctctcaagagagcatacccttcttcgtctgttttcgcagaggtcacaaaggtaatattcattcccaatattttggtaatattatcgatatttatttcagggaaaatgatttgttcctgaattccgagggtataattacctcttccgtccaacttactttcgatccccttaaagtcacgaatacgaggaagagctacgcgaacaagtctttccagaaattcatacatctgttcacgacgtaatgttaccattacaccaattggcattttcttacgcaacttgaagttagagatatccttctttgaaaccgtcgcaacagccttctgacctgtaattgcagacaattcgctgatggcaatatcgataatcttcttatctgcagcagccatacccaaaccttgattgataacaatcttcttcagtacgggaacctgcattacggttttataaccgaactctttcgtcaaagcaggaacaattctgtcctgatattctttcttaagactggcagtattgctcattacttaatttcctcccctgattttttagaataacgcactaaagcacctttttcgtctaatttacgaccgatacgtgtcggcttaccggatttcggatcaacaacgttcaggttagaaatatgaataggagcttccttcttttcaatacctccttgaggattctttgcattaggcttggtatgctttgataccatattaataccttctacaatggcacggttgtcttttacaagaacttctaaaacacgacctgtcttacctttgtcttcgccggcattaacaaaaactatatcgccttttttgatatgtaatttgctcattactttaagttttacaaaattaaagcacttctggtgcaagtgaaacaattttcatgtttgttgcacgaagttctctggcaaccggaccaaagatacggcttccacgaatatcaccaccggcattcaacaatacgcaagcgttatcatcaaaacggatgtatgaaccatccgggcggcgaatctcttttttagtgcgaacaatgatagccttagaaacagcacccttcttcacatcactcgacgggattacactcttgattgctactacaattacatccccgacagtggcgtaacgttttcttgtaccgcccaaaacacgaatacacaacgcttcttttgcaccactgttatctgctactactagtcttgattcttgttgtatcatgttacttagccctttcgattatttgaactaatctccatctttttgttttgctcaaaggacgagtttccataatttttacagtatcgccgataccgcattcattcttttcgtcatgagcatgatatttcttcgtcttattaacgaactttccataaatggggtgcttttccttccatttaatagcaaccgtgatgctcttatccatcttgttgctggtaaccacgcccgttctttcttttcttaaatttctagtttccatcaggctcaatttttgttgttaagttctctctggcgcaattctgttttcatgcgcgcaatcatcctgcgttgttgtttaatctgagcagggttttcactcggagaaatgctgtggttgatcactttctgatcataagcagccacttcagcatcaattctttctactaactccttcgtgctcaattctctaatttctgcaatcttcataacaaattacgcattttgattagccatatcataatcacgtctcacaacaaactttgttgttaccggaagcttttgtgcagccaagcgcaaagcttccttagcaatatcaaaaggaaccccttcgatttcgaaaatcaaacgacctggagtaacaggcgcaacaaatccttcaggattacctttacctttacccatacgtacttcagcaggcttctttgtgattggtttgtccgggaaaatacgaacccacacctgaccttgacgttgcatataacgagttaccgcgatacgagcagcttcgatctgacgaccggtaatccatttattttctaacgcttttataccaaacgaaccgaatgccagctggttgccacgttgagcttcgcccttcatgcgacctttctgctgtcttctgaacttggttttctttggttgtaacatctcttcttaaattctaacgtttaacgattagctttctttctcttgaagttcttatctctgctgccgccggcattttcatttctgcgacctgaatcttttgatgcagcgaatgaaggagcaagatctctcttaccataaacttcaccacggcagatccaaaccttaacaccgatcaaaccaaccttcgtcaacgcttcagccaaagcataatcaatatctgctctgaatgtgtgtaacggagttcttccttctttatacatttctgaacgagccatttcagcaccgttcaaacgaccagagacttgcactttaataccttcggcccccattctcatggtagaagcgatagccatcttgatagcacgacggtaagcaatttttccttcaagctgacgagcaatattgtttgcaacgataacagcgtccaattcgggtctttttacctcaaagatgttgatctgaacttctttgtcggtaatcttcttcaactcttctttcaacttatcaacttcctgaccacctttaccgatgatgatacccggacgtgatgtgcaaactgtgattgtaatcaacttcagcgtacgttcaataacgacgcgagatacactagccttagcaagacgagcattcagatatttacggattttgctatcttccagcaaagtgtctccgtattttttgccgccataccaattggaatcccaaccgcggatgattcccaaacgattactaaccggattaactttttgtcccatctacaaattaattttgactatcgtttttactaagtgtatcaacaaacagagttacatggttcgaacgtttacgaattctgtatcctcttccctgaggagccggacgcattctcttcaatgtagtagcgcaatctacgctgattgaagatacgcacaactctccaacttctgctttacgttcatttttctgttcccaattggcaatagctgaacgaagcaatttttctactcttgctgcagcttccttgttagaaaacttcaaaacaccaagtgcacggaatacttccattccacggatcatgtctacaacgagacgcatcttgcggggagaagtcggcacattccgcaactttgcgaagtacatggtcttctgagcttcttttcttgcttcagctgatattctttttctagcacccattttattgattctttttattttcagattcctgaatccttgttactaccgattattttttcttgttaccggcgtgaccacggaacgtacgagtaggagaaaactctcccagtttatgacctaccatgttctcggttacaaaaacaggaataaatttatttccattgtgaactgcaatagtatgacctacaaagtcaggcgaaatcattgaagctcttgcccatgtcttaacgaccgccttctttcctgactcattcattgccaagactttcttttcaagctttacattaatatacgggcctttttttagcgaacgactcatagtttacttaattaatcagattatttctttcttctttcaataatatattttgaagaatgcttcttcggagctcttgtcttcaagcccttagcatataagccattacgagatctaggatgacctccggaagcacgaccttcaccaccacccatcgggtgatcaaccgggttcattacaacaccacggttgtgaggacgacgacctaaccatctagaacgaccggctttacctgatttttcaagaccatggtctgaattacctacactaccaactgtagccttacaagcagcaagaatctttctggtttcgccagaaggcatcttaataattgcataatcgccttctttcgaagtcaactgagcaaaagcaccggcagaacgtactaacttagcaccctgtcccggacgaagctcaatgttgtgaataatagtaccaacgggaatatttgccatcggcaaagtattaccaacctcaggagcggcttcgctacctgaaaccactgtttggccaacttccaatccgttcggagcgatgatatagctctttgccccgtctgcgtaatacaacagtgcgatacgagatgtacggttaggatcatactcgatagacttgactgttgcaggaatgccatctttgtttctcttgaaatcgataaatctgtacttctgtttgtgaccgccaccaagataacgcattgtcatcttaccagtgttattacgaccacctgtactcttcttacctactacaagagacttttctggtgtacttgcagtgattttatcaaatgcaccaataactttgtgtctctgccccggtgttgtgggctttaatttacgtattcccatttctttttttagatattactaaagaaatcaattgtttctccttctttcaacgttacgatagccttcttaaaagctgattgtttgccattgataatacctgatttggtatagcggcttttcttcttgcctgagtagttgatggtgttaacatcaactactgtaacattatacatgtcttcaatggcttttttaatctctaacttgttggcatcaggagaaacacgaaaaccatagcgattatccattttttctgtaatcgctgtttgcttctcagttactataggtttaataataattcccatttttctactccttatgcgttaaacagtttttcaataacagctacagaactttctgtcaacaccaaattaacagtatttaacacactatatgtatttaactctgaagccgttataacatttgccttctctaaatttctagccgacaaatatacgaaattatttttctcagataaaaccaaaagtaactttccatcagccactttcagattcttagcaattgttacgaattctttagtcttaggagcttccaaagtgaaatcttctactactacaattgcgttattctttgccttataagtcaaggcagacttacgggccaaacctttaactttcttgttcaatttaaactcataatctctcggtttcggaccgaatacacggccaccacctaccaataccggagagttgatgtcgccacgacgagcaccaccaccacctttctggcggatcaatttacgagtactaccagaaacttcacttctttcctttgatttatgagttccctgacgctgattagccaaatactgttttacatccaagtaaatagcatgatcattgggttcaatgccaaagatagcatcgttcaatgttacctttcttccggtatcttcacctttaatatttaatacgctcagttccattacttttcaattaataagattgaaccttttgctcctggaacagatccttttactaataaaagattgtgttccggcatcaccttgatcacttgcaggttctgaacagttacacgttcattacccatttggccggccatacgcatacctttgaatacctttgcaggataagaacaggcaccgataccaccgggagcgcgcaaacggttatgctgaccgtgagtagtctgacctacaccaccgaaaccatgacgttttactacaccctggaaacctttaccttttgatgtacctactacatcaacgaaacctgcatcttccaaataatctacggtgattacatcaccgagcttatattcggtttcaaaatttttgaactcggccaagtatctcttgggagttacacctgcctttttgaagtggcccatttctggctgtgttgtgtgtttctcttttttctcttcgaaacctaactgtacagcttcatagccatctttttccaaagtcttaatctgtgtaactacacaaggacccacttcgataacagtgcatggaagattttttccctcggcactgaaaacggatgtcattccgattttttttcctaataatcctggcatttcactaatttgttaataaacttacactttaatttctacttcaacaccactgggcaattccagtttcatcaatgcatcaaccgtttttgcagttgagctgtagatgtcgattagtctcttgtaagaagagagttcgaactgctcacgagactttttgttaacgaaagtcgagcggttcacagtaaagatacgcttgtgcgtaggcagaggtatcgggccgctaacaactgcaccggtagccttaaccgtcttcacgatcttctcggcagacttgtctaccagagaataatcgtaagactttaatttaattctgatcttttgactcatatctatatatatgtttctaaattatttgatcaaatcagcacgaccctgtacttctgtcaatacctgcttagcgatagaagaagatacttgagcatagtgcgagaactgcattgaagaagttgcacgacctgaagtgatagtacgcaaagctgttacatagccgaatgtttcagccaaaggaacttttgcttttacaatacgagcacctgtacgacttgtttccataccttcaacttgtccacgacgcttgttcaagtcgccgattacatcacccatactttcttccggagtaaccacttccatctgcatgatcggttccatcaaagcaggacctgccttttcagaagcgttcttgaatgcctggatagctgcgatttcgaaagacaactggtcagagtcaaccgggtggaaagaaccatcgatcaaagtaactttcagttgatccaacggataacctgccaatacaccgttcttcatagccttctcgaaacctttctgaactgacgggataaattccttgggaacgttaccacccttcacttcatcgatgaactgcaaacttccttcaaagccttcatctgccggttcgatacggacaatgatatcggcaaacttaccacgaccaccagactgcttcttgtaaacttcacgaagttcgacagatttggtgatagcttctttgtaagttacctgaggcttaccctgattacattcgactttgaattcgcgtctcagacggtcaataataatatccaagtgaagctcacccataccgctgatgacagtctgtcctgtttcttcgttagtctgaaccgtaaacgtcgggtcttcttcggccaacttagccaagcccatgcccaatttatccaaatccttctgtgtcttcggttccacagcgataccgataaccggatcagggaagtccatagattccaatgtgatcggagcgttttcgtcacacagcgtatccccagtacggatatccttgaaacctacacctgcaccaatatcaccgcaaccgatcgtttccatcggattttgcttgttagagtgcatctggaacaaacgagagatacgttcttttttgccagaacgcgtattcaagacataagaaccggcgttgatcgaacctgaataaacacggaagaaacaaaggcggcctacatatgggtcggtagcgatcttgaatgccaaagcagccatcggttcctcaaacaacggcttgcggacaacgactttttcaggatcactcggatccgtaccttcaatagcttccgtatcttcaggagacggcaaataagcacaaactgcatccaataacgtctgaacacctttgttcttgaatgaagatccgcaagtcatcgggttgatctgcatagccaatgttcccttacggatagccgtatgaatctcttcttctgtgatagtagaaggatcatcgaagtatttttccatgatcgcgtcgtcacattctgccaaagcttcaagcatcttgtcacgccattcttcagcttcagcctgaagatctgccgggatttcttctatgctatagtcggctcccatcgattcgtcatgccaatagatggccttcatcttgatcaggtcgacgatacctttgaatgtttcttcagcaccgataggaatctggataggacacggatgagcgcccaatacttccttaacctggcgaactacttcatagtagtttgcacctgaacggtccatcttgtttacataaccgatacgaggtacattatatttatcagcctgacgccatacagtttcagactgcggctccacaccacctacagcacagaaagtagcaacagcaccatccagtacacgaagagaacgctcaacttctactgtaaagtccacgtgtcccggagtatcaatcaagttgatcttatatttgttacccaaatagttccagaaagtagtcgttgcagcagatgtgattgtaataccgcgttcctgctcctgggccatccagtccatcgtagcagtaccatcatgcgtttcaccgatcttatgggtcagaccggtgtaaaacaagatacgttcagaagtagttgttttaccagcatcgatgtgagccatgataccgatgtttcttgtaaacattaattgtttatcgtttgccatattctttcttagcctttataattaaaatctgaagtgagcgaatgcacggttagcttcggccatacggtgcatatcttcttttctcttgaatgctccgccctggttattgaaagcatctacaatctctgcagacagcttatcagccatagtcttaccaccacgtttacgtgcgaagatgatgaggttcttcattgaaatcgattctttacgatcggggcgaatttcagtaggtacttggaaagtagcaccaccaacacggcgagatttcacttcgacttgaggagtaatgttgtcgagtgcagctttccaaatttcgagagcggacttttcttcgttaggcattttggccttaactgtttccaaagcggaatagaaaatttcgaaggcagtattcttcttgccatcatacatcaaatggttaacgaatctcgtaaccttaacatcaccgaaaacaggatccgggaggatctgtcttttctttggttttgcttttctcattttgttttcaaaaatttcgttcttgtttcttggttgcctttaatacgtcttcaacggttccgctgaaccatttactcaacctatagcctatccaaataactcaaaccagctttaatacttaaatttaaattctcagtttgaagggatgtaactaattacttcttctttcctttagctgcagctgctgcctgccccggtttcggacgtttagcgccgtatttggaacgtctctgagtacgtccgtttacgcctgcagtatccaaggttccacgtacaatgtgataacgtacaccaggaaggtccttaacacgaccaccacgaaccaacacgattgagtgttcctgcagattgtgtccttctcccggaatgtaagagtttacttcttttccatttgtcaaacgaactctcgctactttacgcattgcagagttaggcttcttcggagttgtagtataaacacgaacgcaaacgccacgtctctgcggacatgaatccaatgcgggtgatttacccttttccaccaaagtttcccttccttttctaactaattgctgaattgtaggcatttcttttcttttttaaactttgaatgtgttattattataattatctatttcttcaattttgagctgcaaaggtacacattcttttcggactatcaataagttgcgccttctttttcgcacacttcgcgctaaaacgctgcaaaggtacgcatttgttcccgtttcacaagaggccgcttttattcatttataaataattaactattatttctcttacaaactccgttaacccagaacaaccgacctcttttatacgaaatccagtaggtatcggataaagaatcgatgcccactggattcacatttgatgcttatcggatcaaaaacgaacggctgttagaagagtatcgatcccccttcagtcgattatttgaaacgtttctccaattcctcgtccgtcaatttcgaaataatggtttttccatcaggagtaagattcgactcctggcaggagaaaagagaagcgagcaagttgtccatctcttcaccagacaggatctttcccggacggatagcagccgcttttgccagagaaagtgccaacgagtcacagatctcctcatgtacttcgcaaccggtatcgatcacacgatccaccatattccgaatcaaagataccggatcaagattctccacaccggcaggaagtccattgatagcgtagctgttatttcccaggttcgtcagatcaaaaccgataaaacgcatatcttcgagcaaggtcggcaagaccgtagcctcgccagcggtaaactcgacaatctcagggaaaaggacttgctgggaagcacctcgctgctgcctgatgtttgtaatgtactggtcgaacaggatacggacatgggcacggtgttgatcgatcaaagccaaacctgacttcaaagaagttatgatatattttcctttatactgataacaagggttggacacatcgttgaacaaactgcccgaagtgtcctgaacagccacttcgtcagcctcaatagttggctcggaaagatccggagccaagaaagatccggttaattccgccccctgtcgtatagcgttccggtcaccctcgaaatcattataaagcttggaccagtcgaattccggtttcttataggaagaggtttcaaaaggattatacccggaattcacctgcacacagggagctttataaggtgccgcttccttcacgggattatacacaggaatatcgatggcgtcttccacatcgaaatcaatagtcgggatcgcactggacttggccagcgcttcacgagtcgcggccatcaggatttgccagatcggctgttcgttttcaaacttgatctccgtcttggtcggatggatattgacatctatcgttgccggatcaagcgtaaagtagataaagtagttcggctgctcacctgccgggatcagttgttcgtaagcctgcatgaccgctttgtgaaaatacggatgcttcataaaacgtccgtttacaaagaaatactgcaaagcccccctcttctttgccgaatcaggccgtcccacaaagccggagatcgtcactagcgaactttgcgcatccacagaaaggagcttctggttcagcgtttttccatatacattaacaatacgttgcctcaaaccggactcaggcaggttgaatatctccgtatcgttatggtaaagagacaaagcgacctgcgaattgaccaaggcaatccgttcgaactcattgatgatattccggaactccgtctcattcgatttcagaaactttcgacgtgccggaacattaaagaagaggttcttcactgaaaaaatacttccctcggtacaggcatccggttcgacactctctaattctgaacccgaaaatacaagatgcgtccccagttcggctcctttcaggcgggtacgaagctctacttgtgaaaccgccactatcgaagcaagcgcctcaccacggaatcccatcgtatgaagagaaaaaagatcgtctgcagtagaaatcttcgaagttgcatgccgttcaaaagccatgcgggcgtcagtctcagacataccttttccatcatcgatcacttggaccaatgtacgaccggcgtcctttatattcacctgaatgtgtccggcgccggcatccaccgcattttctaccaactcctttacgacagaggcaggacgctggataacctcgcccgccgctatctgattggcaatactgtcaggaagtaaatgaattatatcactcattacataaacaagtaccaaaatataccacccaaaatagcagcggccaataacaacttcatgttcttatatgtccgactccgggaatcatgcccgttatcacggctctttttcagatgagaagtgccttcgacaaagctacctttgatttcggctttataatcatcaatcgacaattcttcttccatgccaatctcacgcttcactttgcggatgcgatcttccatcgcctccttatgaggatcccaatagattggcttatgatcgaactgccgaggcttccgcacattataaaatgagaataatgccatagtcttttattatttgaaaaattctttgctaatgtacaaatttattgcttctcttgggtgattccgtcgcttttcttttcaccacctcgtaaatgtcatccctattcttcggacgcagatagtcgaaccaataaaaatctttcaacatcttttgatcgggtttcagatccggaataggagtcaaggtcccggaagcgttgacataaagtcccattctctccagtttattattccttatccacattgaaagatgagaaccttttgcattattcatgccaaccttagaaccatccttttccaaaggataataattcaactccgcatttccgtttacatcaatacgacgcaattcctgtccctcgaaataggctttcagatcattccccttcaactggttatagtaactcgagtcgacatgctgtgccgcaaaagcaaactggatcacatgggcatattcgatcgtactatcattcatataaatagcgatcgtatcgccatacagttgatattgttcattccagagaaccggttccgtatacatatataatacagaatcgcgcgtattgaactgcatggagtcacatacgccttgcatatcgatccgatagaaacgtacgccgtaataggccttgatctcccggtagacggagtcgaccgtcaccatctgcaacgtatcggcatgcaagaacaacgtatcgccttgcgaatactcaaggaagcgggcactgtcggttgcaaaagcatatccggtctgttcattataataaccatattcgccttgcagcgtcacatgctgggccgtatcaatcaggctcatattcccatagacctctcccatacccgtatcccgattataaaagatagagtcaccgatcaagatcttctcacccgattcaacctgggactgatcaagcaaaagggatgtgttgttcaccgtatcataccatcctcttgaagtatggatcgtgccactgtccgaaacaatgacagacggccccaggatggtagctaccttggattctgtgtcataatgcaaagtatcggaatacaatgtgaagtcagggttctcaacctgcacgctgtcattgaacaccgccaacttcgtctccggagaatattgtccgtaaaaagaagatagttgattcagagaatctacaattagcccaccttcaaaatagtatccgatattcggaatacgttcataattgaggctatccgtaaagagcgtcacctgcccgttctccatccggacattctcgcgcagataagccacctgcgtgtttccgtcataaaaaagataatctccgtagacgaacaaggtgtctccctgctccatccggacattactgaaagcttcgagcgaattggtctgctcgaaaaagtaagcgctgtcgcaatacatatatgaactgtcatgccggaaacatacatcgccgttcaatatctgcgcatccggctttacagccttatcgaaagatagcgtattggaatggatcaggtataccttcgtctttttgggcgggacagtatccgtcataacctgcaaactatcggctgccttcaagctgtccggcgggacgactgtcacatcttgtgcggtaataacagtagtatctgcatgcacaatactatcttgggcctgtgcaaaggcacagaccgccaacacaaaaaacagacctgtgaaaataaatttatttacagtcctcattctttaatccagccgggatactggaaatcacaattacgccagccgtcgctgatacgcacatatgtgcttttctgcttcttaatgatccagtcatgcagcagctcttcgcgtttccgagattcgacaatcgacttcaaagcctgatagtcatccgatatatttgccttatgctggtccactctggctttcagttttacaatagcaacaacttctttctgcttatcgttgatcatagtgaaaggtttggagatatctcccacctgcatcgtataaaccatcttaccgatttcctgtggcagttcggccatctcgaatttcggagtgctgtggttgtcactttcaaagttctggttcaccatcaaacctttgttatttcttgtatccttgtcagcagagataaaagttgccgcttcttcaaatgtaaatttctttgctgttaagtcgttatacaacgaatccatacgtgtcatacactcgttcaactccttgtccgaaactttcggcttcaacaagatatggcggcagttgatacggtcgccacgcttttcgatcaattggataatatgatagccatattcagtctgcacgatctgggaaatcttcttcggatccttcaagttaaaagcgacgttagcgaattcgggcaacaaacttgtcttacccaaaaaacccagttcaccgccccttttggctgattccggatcttccgaatacagacgggccaatgtcgaaaattcatatttcccgctgttgatatcatcggtaaactggcgaagacgcgccttgatagcatccgtctcctcaaacgggatcttcggttccatcgtgataatctgcacctcgacagttgtcgggatattaggcagactgtctttggacaactggctgtaatacttacggacttcggagggtgtcaacttgatttcaccgatcagctggcgcttcatctgttccacagtctgttgctccatgatcatttccttacgttcgtccttcagttgggaaatctttttaccgaaatattcctccagcttttccttagatcccatctggttgattgcgaaattgatccaacgatccgtctcctggatcacctggttttcactcacttccacactatcgatcttcgcttggttcagaaacagcttctgtattgccatctgttcggggagcacgcaataagggtcaccgtcaaaacgctgtccctcgttttgcagatataaacgctggctttcgatgtccgaacgcaaaattgcatcatctcccaccacccacacgatttcatcgatcacattatcctgggcatacaccacacaagataaacaggcaagaatgaatactgtcaaaatctttttcatcatgtacttctctataagctaccaatcacggttccgtataaaacttgacgtcaccgctcctgactgcatcattatataattcttcttcaaatttcttcaaaaattccaccttacgccgatttgtcagcatctccacgatctgcgcactggcatagtcgtatggcgccacacttcccgcaggcagatattccttaatattcaacagatagcaatatgtactatccgaaacttcgacaaacttgtttgccctcaagaagtcgttcgcattcgacacatgcaccggaatattgtccatcacctggtcaaaatccacccatttgtcgtaaaagtagtcataaatactggcattctgtacactatacttctcaattttttctaaagaagcctcagaagtcgatctataccatccctttacatcaacgaggccgggggcatccaccgggatcttcaggaagagacctttcaccaaagccttgtccaagacaaattttttctggttttcctcgtaataactcagcatgtcgctttcctgaaactcggaagaaagcctttcttttatcaactgttcctgataccgatagcggatcagcgaatgacgatattcctccaccagcttatccacttccgccttatcttctccctccaagttgcgcaaggccacatcgtagaccaaggcatctttcacccacttcctttccaaactttcggcaagcaacatactgtcagccgaggacaatccgcgcgggatctgctgttttatctccgaacgtctcaaagtccggtccttcacttttaccaacacatccgcatcatccacaggctgcgttcccttacaagaacacagcaaagatacgaatgctataaaaatgaagcaatatctcatataactttctctttattatttctttgtcattttactcactttcttcaccagcttccagtttatcgtcaccgggtatttccggttcagctgttcgatccactcggcttccgccttggcttgctggtccatcggcttgttccaaacttccttattgctgatgtcgaacagcaagatgccatcccgatactctttcataagaagatcgaactcaggatgtttcgtagtcagattcttacgttcggcagtagttacgatatctcggataaaaagatcgtaaacctcctgcatgaaatctcccgcatacgatttcgtagagaacggacagcgctggatataataagcgaactcactttggggaaaatccgtgccattcagatgaaacaaagtcttgttcatgtctttcgccttctcgtagaaagcaggatcggacggaaaatagtcgttgcacaaagcttgtagttcggcataagcctcgggatagaagcaatatccgtactcttttttcattcgttcatcaaacgcaccgtaatattcgaaattccgttctccctgcgccatctggcgagaccaggccttcttcttatcatcgaaagaaggaatacctttcttctcgatcaactttataatgtgataaccgaaacgtgttttcaccggtcgggacaattcccccggagtgttcaaagcgaaagcagccacttcgaacggctccaccatctcgccgacaccaaaagctggcaactctcctccccgcttggcagaaccggcatcagacgagtattcttttgccaacatggcaaagtcagctccatccttcgctttccgataaacttcttccgcacgagccaatgtttcagcctctccaaacttcaccgaatctttctcaaacgggatcaggacatgcgctacacgtaccagccccggatttcgcctgcgactgtgtatttttatgatatggaagcccatagtcgtccgaaccggcagagagacggaaccgacgggcaacgaataagcgacattctcaaaggctttaaccgtctgcatcggcagcaaacagtgtacatattcatagccgacattttccttatcggcatctttcagttctttgccgacagcggcaaaatcctctcccgcttgaatacgctcataggcctcgatcgctttctgatataccggaaccgtatctttcgataatgtacgttgcggcaagcggaacagaatatgactcaattccagcacttctccataccggtcatatacggcacgtacagcagcttcctctccatccttatccgacagataacttgaagtcaattgagcccgatagctatccaattcatctttgaacgctttcgtcttgtccagtcccaaatcttccgcttccgccactttcagcttgaagttcttaaacaactccacgtatgcattcacggatttacggtcagacaaattaacttcgctattcttttgtgcaataaaaataaattcatccaacgggatctgctttccggctaccgtcatcactaccgaatcggccgaaacttgtgcatttcctgtcatacaagcgaataccaaagataatacaagcaacttcttcattaatccttcttttaccatatcacgatatcgtttacaaaaataacactaatctaacggagatgcagcttaaaaagtacattaccccattaaattagtgttttttataaatataaaaaccgacattcactttcaaaagacaggcgccttttcatgaaacagctattcccacctctgcaaatcactcgattattttctgcaaaaaacggctacaaaataggtaaaaccgggaggttttcattgtccggcacggtactttagttgccggacacccccatgttgctccctcttacacccggatgtaccggctctctacacccggatgttaaggatggtaacatgggggtgtttacggaattatctgcttgcttctgctaaaaaaagagagggcttttgtggaatgaagaaccgtatttcgctaatttaatacctgttatattcgtttttacatttgtttattcgattattttatatgctttttcaaaagcaaaagaaggcaatacactggttttcaattacatgataaaagcaccctgtttcagaagtgatagaggagtgatagagaaaaacaccctgtatcactgcctctgacgcttgaatattaatagctacaaccttcgcagtgatagagtgatagaggatttgcagaaaacttcgtatgcaaatcacaaccttggaaaattttgatgcggttgccctgaaagtggcaggaatcaataatacgtcatcaaacgtcaatccgtccatgaccactctgtctgcaataaatgacatagaacttatgccttaaaaattattgcacacaaacttacaaaacaattgacaattaacaatggacatttttgtcgcccattgtcaattgtcaattatttaatttgccatttccgacaggaacttaatgcggacgaggcgaatctcttcttccgtataatcaccacctaattcttcgattgcatcttccagatcgtctgtttccgaatccttgaagtattcataaatatcatcgatatgatcttcgtccatcacatcgttcaagaagtagtcgatattgatacgggttccagaataaacgatcgcttctatttcgtcgagtagttcgttaaattccaatccgttcgtcatggctatttcgtctaacgccaccttacggtcgatacgctggatgatcgaaaccttcaatttggatttattggcaaccgtacgaacccgaagatcttcgggacgttcgatctcgttttcttccacatgacgcttaatcagctcaatgaactccttaccatatctttttgccttaccggctccgacacccggaatattctgcaattcttccaacgttaccggataagtagtggccatcgcttccagagacggatcctggaaaataacgaaaggaggcacttccagacgcttggacaacttcttgcgtaaatccttcatcatcgagaaaagggcaggatcgaccgcacaggcggctccaccgcgtacgggaacttcttcttcctcttcatcgaattcgttgtcttctgtaatcttgaaagagacaggtttctttataaactcttttcctttttctgtaatcttcaacagaccgtagttctcgatgtccttggccaaatatccggcaatcaatgcttgacggataacggcattccatgtcttctcttcctcatccgaaccggaaccgaaaatctccagttcattgtgcttgtaagattgtatttcggaggtctcgttgccgaccaacatgttgacaatatattctgccttgaatttttcctttaacgtaccaaccacttcgagtacggcgcttaataattcctttgcttccactttcttttttgggttcaaacaattatcacaatttccacaattttcttccaggtattcttcaccgaaatagtgcaacaagactttccgtcgacatacggaagtttcggcataagcagcagtctccagaagcaactgcttaccgatctcctgttccgccacaggttttccctgcatgaatttttccaatttctgcaagtctttataggcataaaaagcgatgcactggccttcaccgccatcacggccggctcgtccggtttcctggtaatatccttcgaggcttttgggaatatcataatggatgacataccgtacgtcgggtttgtcgatccccataccgaaagcaatggtcgcaacgatcacgtctgctttttccattaggaacgcatcctgattgctcgaacgctgctgcgaatccataccggcatgataagggagcgccttgataccgtttgctttcagaatatcggcaaattcttccaccttcttacggctcaaacaatagataataccggattttccctcgttggacttaatatatttgatgatctcgcggtcgatattcgccgttttcggacgaatctcataatacaaattagaacggttgaaggaggatttaaagacagaagcgtcaatcattcccaagtttttctgaatatcgtgctgcactttcggagtggctgtcgccgtcaaagcaatcaacggacgcttgccgatttcgtttatgatcggacggatacgacgatattccggacggaaatcatgcccccattcagaaatacaatgtgcttcgtccactgcataaaacgaaatattgacttggcgcagaaactccacattttcatctttggtcaatgactcaggagccacgtagagcaatttcgtccggccattacggatatcgtcttttacctggtcgatagccgatttattcaaggaagagtttatgaaatgggcaaccccgtcctcttcgctgaaattacgcatggcatccacttggttcttcatcagggctatcaaaggagaaatcactatggccgtcccctgcatcataagagaaggcagttgataacacaaagattttcctcctccggtcggcatcaacacaaatgtatcatttcctgccagtacattttcgatgattgctctctgatttcctttaaaggtatcaaaaccaaaatgttttttgagctcttctgtcaaattatccttcttcgccatactattcatattttaaaaaccgccgtcaggtcatctgcagacggtttacgtccgatttttcaaacttttccttcgcatactccaacgtgacatggagtgtcttttcatttgcagacggcatactgtacatggcatccatcatcacagcctccacaatggaacgtaagccacgtgctcccaacttaaactcaagtgccttatcgactataaattcgaacacgtcttcgtcaaatgtcagttcaatatcatccatcgcaaacaatttgatatattgcttgatgatcgagttcttcggttccgtcaagatattacgaagcgtactcctatccaacgggttcaaataggtcaagataggcagacgtccgatgatttccggaatcaggccaaacgatttcaagtcggttggtgtaatgtatttcagcagattgttgcgatccacctgcgccgtgttttcgtttgcggcgtatcctactacacgtgtattcaaacgctgggcgattttcttctctattccgtcgaaagcgccaccacatacaaacaggatatttttcgtatccacggcaatcattttctgctccggatgcttgcgcccaccctgcgggggtacgttcacgatggaaccttccaagagcttcagcaagccctgctgcacaccttcaccgcttacatcacgggtaatggaaggattatcgctcttacgggcgatcttatctatttcatcgataaatacgataccacgctgtgccgcttcgacatcataatcggcagcctgcaacagacgggtcaaaatgctttctatatcctcccctacataaccggcttctgtcaagaccgtcgcatctacaatggcaaacgggacatggagcaatttggcgatcgtacgggcaagtagcgttttacctgtccccgtagcacccaccataataatattcgatttctcgatctcaacatcatccgatgttactttctggatcaaacgtttgtaatggttatacacagcaaccgacagataacgtttagcgtcgtcctgacctatcacatattggtccagaaaagtcttaatatcctcaggcttaggcagatctttctggtttaatccaaaagaactccccttgccaggcatttgttcttttactatttcgtacgcttgctgtgcacattcatcgcaaatagcaccggaaatcccgttaatcaacatattaacgtcccggctaccgcgtccgcaaaacgtacagctatcgcctgttttggccattccgtatttgttttttaaagagagtacgttaaaagctcctgttcccgcattcgatacaagggacaagggacttttaacgcagccccttacattaatattatttattacgaaccagaaccttgtcgatcataccgtaagccaaagcttcctctgccgtcatccaatagtcacggtcactatcgtgttcaaccttttcataaggttgacctgaatgagttgatatgattgtgtagagttccttctttactttcaggatttcacgagccgtgatctcaatatccgaagcctgtccctgcgcaccgcctaacggctggtgaatcatcacgcgggaatgaggcaaggccatacgcttgcctttcgttccggcgaccagcaataccgcagcaaaagaagctgccatacccgtacagatagtcgacacgtcactactgataaactgcatcgtgtcataaataccatatcctgcataaacagagccacccggagaattgatataaattgaaatatccttgcccggatcgcttgaatccagatacaacaactgtgcctggattacatttgccgtataatcgtcaacctgtgtacctaaaaaaatgatacggtccatcatcaaccgtgaaaaaacgtccatctgagcaacgttcaattgacgctcttcgataatcgtcggagatatgtaactgctggttatattcatataactgtccagcgcattactgttcatccctaaatgcttcgttgcatactttctgaaatcttccataatctatagtcttattgtgttaccgaaaagtcataaaaaaagggattcctctcttacttatcggaataacaaagttataaataaatttctgaaagaaacaacttatttgctgtccggtaagatattttttcgagagaaagccctttttagataaaaaagctgctgctgccgctttttcaggtagtcttattcttcaaaaagtttgttgaattcgtcggctgtcacctccttggtatccagttcgacttgttctttcaaccagcctgccagtttttcttcaactgcacggtcaatgatattctgcagcgtctgcttgtttttcaaaatgtctttagcatagttagccaatacgtcttccggtacggaaagcattccatactgggcgaactgggctttagctacacgtttagcgaagccttcgatatcagcatcttcaactttcaatccgttttccttcaccagattttctttgatcagctgatatttcaagtcttctatgatccgaggatattcttcgtcgatcttttctttcgtattcttttcattggcaaccagcaaccaacgctttaacaggtcttcggcaaacgaaagttcaccggccttctgaaccagcaggtcacgggcatcgaccaagaacttgaagtcgctctgcggagtgaactgctcagccaaagcttcgcggatcttgttcttgaattcttcttcgctggtaacaacgccttcaccgaagactttgtcgaacaattcctggttcagctctgcattcttatgacgagtcacctccgtgatttcaaagctaaaatcgcctgtgataccactgacggcttccttattcactttcaagaaagaagcgatttctgcttctgcaccttcgtaggccttattcggattgaatacgatcacagagttcttctttgcaccgatgaatttagctttttcagcttcatcctttatgtacatcggcatcaaaacagcctcttcaacaacgataccgccttctttcggagaaccgttttccagttcggctaccgtacctttcaccaagtctttttcttctacatcctcaacctggtcgtacgttccgaaattagcctggtaagcctcgacttgtttgccgatcatttcgtcgtcgatattcacctggtaataaggaaccttgtcatttttggacaattcgatcttgatttccggagccagcgctacatcaaaacaaaattcgaagtcttcctgagtatcgaagttgatttctttctgttcagtttcgttaggcagcggttcgcccaaaatgttcagtttgttttcacggatatagttgtacaggttttcagaaaccaatttgttgatttcttcgaccaacacatgcttgccatacattttctttaccatacccattgggaccatccctttacggaaacccggcatctctgctttctgacggaagctgcgaaggctcttttcaaccttgtctgcatagtcagctttcactatttccaatttcacaatgccttttgtagcatcaatgtttttaagcgaaacgttcattctgaatgatttatttaattaatagtcttgttcgaattttagggtgcaaaattagacttaatcttttaatctcgcaaattgtttgcttaaattgttataaccgagatgaatttaggagcaatattatttttttcaggataaattgttgtttatctaaaataaatgtattcctttgcgatgtgaaagggcattaaccttgaacggacctaacattgttttttatttcttcatttactcgttacttgtcgaatatctctcactgttacgaaattccggtttactactttcattgaagtaacaattttattttttaatttctatttttatgaacatctatgttggaaacctgaactatcgtgttcgggaagatgatttgaaacaagtaatggaagaatacggtacggttgaatccgtaaagatcatcaaagaccgtgaaacaggcaaatcaaaaggttttggtttcgttgaaatgccggacgatgaagctgcgaaaaaagcaatcgccgagttgaacgaagctgaatatgaaggccgccagatagtaataaaagaggctcgtcctaaataattacttttccgggaaaaaataagaaacttctgcttatctttgagcagaagtttttttatgctcaaaaatatgttcttaaaaggtatatatgccggaaaaccggccatcttccaattgaccgtcctgcttctcctgattctggcaggcgcagttttctcatcgctgattgcaatgggattcttctatatgatctatggtctgcacgccgatattacgcagtattcggacatgatgcgcctgttgcaacttatttcagccctcggcacattcctctttcctgcattggcacttgcgtggctgtgcagctacaatccgaaagaatatctgtcgatcgggaaaatgcctaaaggacacatattgcttctcacatttctcagtatatttttgatcactccttccatcagcctgaccggaatactgaataagcagatggaattgccatcttttatggaacccatagaaaactggatgcggttacaagaggaaacggccgaacaactgactctgaaattgttggccggaagagggatcataactttgttttttaacctgatcgttatcgcggtagctgccggcattacggaagaattccttttcaggggcgctttgcaacggataatcgggaaatggacgtacaatcatcatatcatcatctggagtgcagccatcattttcagtaccttccacatgcagtttttcggcttccttccacgtatgctgttaggagcttatttcggatatttactttattggacccggaacatctggataccggtatttgcccacttcgttaataatgcaattgctgtcatcagcatgtcggatgccaaattaaaagacaacgaattcattaccggagatatttccacacagaatttgttgccctacacaatcgtggcgatcgttgcgttatttttctttgtccgttgctgtcggaaattgaaaattatcagatcgtctaatcttaattcttaaaagtcttttttgcggagaacaaaatccttacccagatatttttcacgcacaatttcattttcggccaactgctcggcagttccctgaaaaagcacttttccttcgaacagcagataggcacggtcacagatactcaaagtctcgtatacgttatgatctgtgatcagaatcccgatattcttatgtttcagctttgcgacaatgctctggatatcttgtacggcaatcgggtctaccccggcaaacggttcgtcaagcatgataaatttcggatcgatagccagacagcgagcgatctctgcacgccggcgttcacctccggacaactggtcgcccaaattcttccgcactttattcagaccaaattcggcaatcagactctccaatttttctttctggtattcggatgttgtctctgtcatttccaatacggaacgaatgttatcctccaccgtcattttacggaaaatagacgcctcctgagctaagtagccaataccattacgagcgcgtttatacaccggaaacttcgtgatctccatatcgttcaagaatatctttccttcattgggagtcaccaaccctaccgtcatatagaaagtagtcgttttcccagctccattagggccgagcaatcccacgatctctccctgcttcacattgatcgaaacatgatttacaacggtacgtgtcttatattttttaacgaggtcctccgtacggagcaccatttgttgttcgtctgccatatccaaaatctttgccacaaagaaacggaattaattccttctatacaaatcgttcactacgcttttattgacttacagcccagtttagattaaatacaaaccagaagtatcaagcctgaaatgaacagttgttcccagaattgcgttatatttgcagactgtaattgaatagaaacataaaataatgaataaagcattacatcaagtaggtgaatatgtcatgttgatggggaaatgcatctccgtacccaaccggtggagcatgttctttaagcagttgataaaggaaatatataaattaggagtcgattccctttggatcgttgtcatcatttccatttttatcggtacggttattgccatccagatttcactgaatatcagttcgccgctcattcctaaatttacgataggatatacaacgcgtgaaattatcctgctggaattttcttcttccatcatgtcactgatcctggcgggcaaagtcggtagtaacatagcctccgagatcggaaccatgcgtgtgacggagcagatcgacgcaatggaaatcatgggagttaactccgccaacttcctgatcctgccaaagatggtcggtatgatgactttcattccggtattagttatcttcagcatgttcactggcattttaggaggtatcgcagccagccattccacaggaacaggtatgacacccgcttctttcgaatatggtttgcagttctatttcaatgagttctacatctggtactccatcattaaatccgttgtgtatgcatttattatttcatccatagccgcctacttcggttacaatgtaaaaggcggtgcactggaagtaggtaaagccagtacgaacgcggtcgttatgagcagtatcatgattctgctggccgacgtgatcttaaccaacttaatgctgacataaaaatggtagaagtaaaacatatcaccaagtcctttgaaggacgagttgtcctgaatgacatcagtgctgtattcgaaacgggaaaaacaaacctgattatcgggcgaagcggttccggcaaaacggtacttattaaaaatattatcggactgatgcgcccggactccggagaaatcctgtacgacggacgtgatctgacctcgatgggcaagcatgaactgaacatgctgagacgtgaaatgggtatgttgtttcaaggatcggccttattcgacagcatgacggtgttggaaaatgtcatgttcccgctggacatgttctcaaacgacacttacaaagatcgtttgaagcgtgcccagttctgtctggaccgtgtgaacctgtcggaagccggccacctctatccttctgagatcagtggcggtatgatgaaacgtgccgctattgcccgcgccatcgccctgaaccctaaatatctgttctgtgacgaaccgaactccggcctggaccccaagacttcgctgattatcgacgacctgatccacgatatcaccgccgaatacaaaatgacgactatcatcaacacacatgacatgaactccgtcatgaatatcggtgaaaacattatcttcatcaaagaaggcgtaaaagaatggcaggggaacagcaaagaggttattacttccaagaacaaagcattgaacgattttatcttcgcttcagacttgttccgcaaggttaaagaagtcgaggaagaagagttaaaagaagaagaactgaaagcaaagtaaaaaataatccgatgcccatcggatgaaaaaacgacgggcatcggatcggaaagagataggcatcggattaatatccgaacaattcttcctgtgtcagtttctggatcggaccatattgtgacaaacctttcagatcgagatccttttcatcgcctaatacacaatagatataggtacgccctttcacccatttttcctggaatgccttgatttcaggcaatgtcattgtctgcgccttctcgaacagttctttacggctgtccgtgttcagacctaaatcctgggcattcagataagaccaaagaacatccgatttggtaatacgctccgtacgcaaacgggtaataagagcatctttagccaagttgaacgctttttctgattccggcatattattgataatttcatcgaaagctttcatcgcatcaatcatcttatcattctgagtcgcaatgaacgtacggtatacatacggatatttcagtttggacggagtaataaggaaagctcctgcagaataagccagcccacgcgattcacgcatttcctgaaatacgatcgcgttcatgccaccaccgaagtattcgttatacatattcaatgtaggttggatagccggatcgaacttttcacctcggttagagacagcagagaaataaatctgtttagcatcatactgtgcaagcagaactctatttgcaggagtttcctgctggctaaactcaattgctgccggaaccggttgcaactgttcagggacattatgatattgtttgatgatgtccagaacggcctgtggtttttccggaccataatacaagatcttatgatcgaatgagttgatcttatgaatgcgatcgaccagttcctgcgggtccatctgctgcaactcggcagttgtcagtacatttgtagcaggagacttcggcccccagatagcatactggatcagtttgttgaaattctgtccctggttcaatttagcatcagtcctttttttcaagatatcacctgcaaggtttccataagcctccttattaacctgtgcatcggccaagatctcttcaaacagagccattgccttcggcatgttctctttcaaaccttccagcatcacatatgtgcggtctgaacctgggaatacattgaaataacaagccagtttgtagaattcttcattgatttccttcagactcattttagatgtgcccaaatacttcatatattcgaaagcggtgcccattgccttatcattattcgtacccatatcgaatacatacatcagagagaagagatcattggaagtattctccttatacaataccggaatattggattgggcggtcagtttttgcaaatccttactataatccaagaataccggttcgatcggagccacttttgaagcctgtatttctttcaagaacagacttgaactatcgcgattcatcacgatcggagtgattttaggtttgtcgatcttcttttcgttcgggtctttaccttgtcttttatagatgagcgcatagttgtcaccgaaatatttgttggcaaaatcgacgatctgttgctttgtcactttgctcatgcgatctaacgaagcgacttcatctttccaatcgacaccgtcgatgaaagaagagacaaacatatcggcacgaccgtcgttacgatccatccggtacatttgcatcagtttatagttattgatagcagcttccagcaagccttcgtcaaactcacctttctttagcttatcaatttcagccaggaataggtcttttacttcatccaaagtctgtccctgtttcggacgaccactaataacaaatgcattataatcggacattccgtatgttccggcataacaacttagtactttctgttgctgaaccaaatcgatatccaacaaacctgctttaccgttattaataatttcgcctgtcagattcagcaaatcctggtcaggagaagcagctcccgggaaacgccaacccaaagtcacattttcagcatcgacacccaacacttcttttataaccggtgctttaatcggagactcatgcgttactggcaacttcggcagattggggttcggtttcaaatggccaaaatatttattgatcgtctcgatcatctggtccggatcaaaatcaccggacagacagatagccatattattagggacataccaagttttatggtagtttttgatattcgtgatagacgggttcttcaggttttcctgtgttccgagaacagtctgcgttccgtatggatgatcggggaaaagagcggtcagaacagcttcatacactttacggccatcactggtaagagacatgttcttttcttcgtacacagtctcaagctccgtatgaaagccacggattacattgttttcaaaacggtccgcctgtatcttggcccagttgtcaatctggttggaaggaatatcttccacgtagaccgtttggtcaaagccggtatacgcatttgttccagttgcaccaatagcagacatcagtttatcatattcgttcggaattgccaatttcgaagcctcataagaaacactgtcgatctgatgataaatagcctggcgttctgcctcatcagtagtcttacgatacacctcaaaaagctgttcgatctgatcgagcatcggtttttcctgttcgtaattctgcgtgccgaaccgctgagttcctttaaacatcaagtgttcaaaatagtgtgccagaccggtcgtttcggcaggatcgtttttacctcccacgcgaacggcaatatacgtttgaatacgtggggtctctttattcacagtcatatacactttcaggccgttatccaaagtatagatacgggctttcagaggatcgttcgggaccgactcgtatttaaacggggaagtctctgcacatgcagttgccaaaaggagaataaaggctaactgaagaaactgaatcgttttacgcataaattttagatttagataattacatgcgtcaaatatatgcaatttaaaataaaaatagctcttatccgaaaaaaaacagaacaagagccgatttttttcggataggagctaatatatgcccgtacaaagattatatttacattaaaggccgaacgcttcttttaccttatcgacataatccagtttttcccaagtaaacagctccacttcgcaaatggtcggttccggattataacgagaagtaaatgtttttgtcacaacctgcggtttacgtcccatatgaccgtaagatgcagtttccagatagatcgggttacgcaatttcaaacgttcctcgattgctttcgggcgcatgtcaaacagattccagatcttttctgcaatctctccgtctgtcattttcacgttagcacggccgaatgtattcacgaagatattcattggcttagccacaccgatcgcatacgaaacctgtactagcatttcatcagccacgccagcggcaaccaaattctttgcaatatgacgagcagcataagcagcagaacggtctactttcgaggggtcttttccagaaaatgctccaccaccatgagctcccttgccaccgtatgtatcaacaataatcttacgacctgtcaaaccggtatctccatgaggaccaccgatcacgaactttccagtcggattcacatgatagataatatcatcattgaacaaagcctgaacatgagccggatactgagcctttacgcgcgggatcagtatactcttgacatcttctgcgatctttttctgcatagccaagtccgcttcttcctgtgtgataccttttgcagtgataaattcatcatgttgtgtagaaacaacaatcgtatcgatgcgcagcggttttccgttatcatcatattcaatcgtcacctgactctttgcatccggacggaggtaaggcatcaggtcgttttcattcttacgtatctcggcaagctcccacaacaggctgtgtgaaagatccaatgccagaggcatatagttttctgtttcgttagtggcataaccaaacatcataccctggtcgcccgctccttgattataaggatcttcgcgctcgacaccacggttaatgtcgccactctgttcatggatagaagagaacacgccacatgatttcgcttcaaactggtattcgcttttcgtataaccaattttttcgatcacgttacgggctacatcctgtacatccacgtaagcacttgattttacttctccagccaagacaacctgtccagttgtaacaagggtttcgcaagcaactttagagttcttgtcataagccaggaactcatccagcaaagcatccgatatctgatcggctactttatcggggtgcccttcagacaccgattcggaggtgaataaataactcattgttttttgaattgacaatcgacaattgacaattgacaagtaatggagcgatccaataaagccaacagacaatttacaattgacggttaataaatcaaatgaatggattgacgaggggaaatttgctttgccggacggcagttaaaaagggcttgtttttagcattttttcctgtggttgcaagcaatacaaatctatccacatcaattcgcatgcaaaagtacgaaacaattgataattgacaattgataattgacaattattttttctttttagtgttacgcagtgcttttttatacttgaactcagctctcatcttggcagcacccgatttatgcgtaccacgcaagaagtccgaaaacttaatctttttctctccggcattttcgtcttttccctttttcttaaagaccatgccaccaccggtcaatatcttttcaaaatcattcataatcgttctttcaaatctattatacgttctttcaacacaggatgcacgacaaacggagctatttcggccaaaggttccatcacgaacttccgttcatgcataagaggatgcggcaaggtaagctccggtatctgcaaaacctcgtcctcatacagaaggatatcgatatcgataatacggtcatgatagactccgctgcttttttccgcgcgccccaattctttttcgatccgctgggttatccgcaataattccaacggagaaaaagaagtcttcaatttaacagccgcattcaagaaaaagttctccgactcgaacccccacggttccgtttcatagaaaccggaaagggcgagaatatctcccaccctttcagccagcaatgctgcagctgttatcatgttccgtcgcttattccctatattggttcccaagcccaggtatgcaatcgccataagtacccgtttttacaggatcaacatggcatcgccataagcaccgaaactatatttttctttcaacgccacgtcataagcatccataatcagatcatatcccccgaaagaagctgtcatcatcaacaaagttgacaacggcatatggaagtttgtgatcatgctggacgccacactgaagtcatacggcgggaaaatgaacttattggtccacccttcaaactctttcagatggccatccgtactgacagccgtttcgatagcacgcatcacggacgtaccgaccgcacaaatctgtcggccgttatcctttgccgtattcacgatgttcacgacatctccgttcacgaccatctgctcagaatccatcttatgcttggtcagatcttccacatcgatttcgcggaagttgcccagaccggaatgcaatgtcaggaaagcgaactggcaatccttgatctccagacgcttcatcagctcacggctgaaatgaagacctgcagcgggagccacaactgcaccttcttccgtcgcaaaaatattctgataacgatcttcgtcatccggttctacaggacggtcgatatatttaggcagcggagtttcccccaatgcgtacaatgcctttttaaattcatcatggttcccgtcataaaggaaacgcaaggtacggccgcgtgatgtcgtattgtcgatcacttcagccaccatcgaatcatcttcaccaaaatacaatttattaccgatacggattttacgggcaggatcgaccaatacatcccaaagacggagatcttcgttcagttcacgcaacagaaaaacttcgatacgagccccggtcttttccttatttccgtataaacgggcaggaaaaactttcgtgttattgaagataaacacatctttttctccaaaatagctgagcaagtctttaaacactttatgctcgatctctccggtcttgcgattgacaatcatcaatctggactcgtccctgttctttgccggatggagagcgatcagctcctgcggtaagttaaatttgaatttcgacagcttcataatataaattctatttttattttattcttatcattatcaatcctcacaatcctttctgattatgatattttcatctaaaaaggtatcgatatcatcgggagacatacatttggccagtgtgatgtctccgatacgagtccgttcgagagctatcagatgagcacccgactgaagggcaacaccgatatcacgtgccaaagcgcgaatataagtgcccttgctgcaaaccacccgtatctttattaccggcagatcacactccaacagttccatttcatcgatcacaagcgtcttggacttcaattccacttcttcacccttgcgagccaactcatacgcccgcttaccatccaccttgcaagccgaaaacacaggtggaatctgctgaatcgttcccacgaacgactgtaacaccttctctacttcctcacgggtaatatgttctgtcggatatactccgtctatctctttttccaaatcaaaagaaagcgtcgtttcccccaacttcaaggtagcgacatactcctttgtctgatactgaaattcatcgatcctcttagtggccttgcccgtacagacaatcattacccctgtcgccagcggatccaaagttccggcgtgtcccacttttatctttttcaccttcagcttccgcgataatttataccggaacttgttcaccaggtcaaaggaggtccacttcaagggcttattgaaatataatacttctcctgctataaaatccattcttatttaagtaacgtacaggcaatcgtaaccaaacctgcaattgcacaatagatggcgaaataaatcagttttcccttctttacgatattaatcatccatttacaggcgatacatcccgatacaaatgcagcaataaacccgaccaccaatgacaatgccggaatatcacctgctaccgcttcgccttttaccgctttcatgacatccaacaacgcttcacccaaaatcggaggaataaccatcaggaatgagaactgggccagttttgccttattgtttcccaataacaaaccagtcgcaatcgttgttcctgaacgggaaagccccggcatcacggcacacgcctgagccaaaccgatgataaaggcatctttcatcgagatactttctttctggcggggtttggcataataagaaaatgcgagcaacgcagccgtcagcaacaacatacaaccgacaatcagcaatcccgacccgaaaatatcttccaccgtatccttgaagaatacgcctacaataccaataggaatcatagaaatcaggatattgatcacataacgagtttctgcattcatcttgaacttaaacaaaccacggaatatccattcgatctctttccacaaaatcaccagcgtactaaacacggtcgccacatggacaacaatcgtaaatgccagattttcttctccttgaataccgaacagagcagagccgatagccaaatgtccgctactgctgaccggcaggtattccgttaatccctgaacaatccccagcactaaagcctcaaaccaactcattccgctacttccttatttttgctgttttttaaaattccgaaaatcatcaatacgaagccgatcactgtcacagccggagccacaacaatacggcgggaactgaaaatctcaggattaaaacctgtcggatcctgcgaaccgccaccactcatcaacataaaaccaatcgcgataacagcaacagcaacagcgatcaaaataaaattttcttttccaaaagcaaaatctctcttagccatacatttatatataatatagtttatcaacacccattcgtaaatacttgttcaccgcaaagacagtagccgtaaccgaaagcaggatccccattatcaatacaccggcataaacaattatcaatactttaatatccaacaactggacgaaaccagataattcgttttgtaaataatacaacgctcccgtcaacattaatattgcgaaaatggacgcaaaaataccactgaccacattgtaccgcacaaacggccttctgataaaaccaggtgtagcccccaccaacttcatcgtatggatcagaaaacgtttggaataaatcagcaaacggatcgtgttactgatcagcacaaacgagattgccatcaacattacggcaagtgtaagcaagatcaggctgacacgtttcacattgtcgttcaccatctgcatcatgtctttccggtaaagcagatctgaaacggaagtatatttttttattttcttttcgatcaattgcaggctgtcggcattagcatattccgaatgcaatttcacttcaatggaagcctgtagcggattaaagcccaagaacgtttcgggattttcccccaactcctcctcaagttccttgacagcctgttctttcgatatatattcggtcgatttgatataaggcaaggcatccagcgtcttctgcatcttctttatatccgcttctttctgattatctttcagcacgatcgaaaatgaaatgttctccttcacatatacggaaagtttgtttcccaacaaccctatcagaaaaacgagccccagcagaaacagtaccaatgagatacttataatggaagtcagacgagaattaaagaaagaaacagaactaacctttttaccttcagccattagacgtaaccttattgttattaaataaagcgaggagatgcgttcagagaacacacctcccaatttttctgcaaaagaacgaataatttatgagatagtgattactttacaattctttaactacaagtcaccgagcatagatggataaaaagtagcatgcttatcttaaacaaacgaagagactgtatccatacacatagtgtatttcgacacagcctcttgtttttttaactgccttcgaccttcacaggctactggcagaagaactttatttcaatactttagtattaataatacgatcgcttgttcacctgtcgcaggataattgccgttatttgtagagatgcactgccgtgcatctctacggcgcacgatcttatttagaattatttgattataattgtaatgttattattctgagattactttacaattgcttttacagcgtcttcaccttcaatagcaactacaactacaccagcaggagcagcgatagtagcattatcagaagtaaccactgtattagcgactgtctggcctaagatgttagtgataaccactttcttgccggcagcacctgcaactgtgatctggccgttaccggcgatgactgttacagaagatacttctacgtcttcgttggcagtagcatcactttgagctgtcgtattcagcaacaaagcctgatagatatcttcataaacattttgatgccagttgttgccattatgatcaccagtttcactataaccaccacgaccggtagaaacaatgttgtggttttgttccttcaaccaagtgttaccattggctgcataaccatactgtttacccttcgtttcgatatagaagttttcgtcatcactctgatctttcaaacggaatgcgatagaagctccatcgtaagccttttctttcagaacaactttcttggcaacgtttttgccgtcatacaaatcgcggtcatacttgattgttgcatcagcagcatccatgatgtacaatgtatcctgatagtggattgcatttacgaatgcataacgagtatacacattttcgaatggtttaacgctgttcttcaaataagccggaattacgctatcgacagaagcatcaaccatgtaacgtccctgtaagtaatcaatcacctgataaaggtcaccgatagccggatgatcttcgtgattgcattctgctgttttcttagcctcaacatcaagagccaacagataagtaggcatgctcgatacatttacatgagctgtatcgataaagaattcgttgttgcgttccggttcttcaacagcactgaagatgttcatataagtaacaccatcgattacagattcgcccaatgtacggttttcattgttcgttgaatagaacttttcagtcttcagaccgacaactctgcgatagtacggcattgtatctgcctccaagatgaacgattcggtacgatcctgacacaagttttcaacttttgcatccagttgaccttgttcgatagccagtttatccaaagcatcgtcaaagacgtatttccaaccagcaaatttattcacatcgtcagtatacacatcatctttatctacaggataagcagaaggatactcagtacgaaccaacgcataataatggccttcttcgttatcggcagtccaatggttattttctttcaatgtaaaataagccaatgtgtaatttgcattacgatccaaagtatcagccacgcaatatttaccattcttgttgataccaacaaatacacggtcattgttgatcatatctgcatccttcactttcagcatataaactgatttgtaaagttgagttgcaccagcagcttcgcttgtataaccgtaaggtatgttcgttgattcgtaagcagccgcatcccagttaactttaaccggaaccagttcaaagttagaaccttcagcctgagctctcaacagcgtatctttaccctgcttaacagcgttcagataataaggatctgttccataatcgaagaactgtttcagtttgaatgtattttcgattactttatcacccggattcagataacccaatgtattgaccggatcaactttcgtgaacttcagtgtatcagagcaagcgaacttagtgttgtggtgtcctaatgtattatcataattatgattgataatgaatacattgtcatcagctttataaagctggccttcgaatgccacatttgaatattcacggtttacaactttgacacgagcaacaggatcttcttcacaacctgtatattcaacaacccactgcgttgcaggcatgtgagcgaagttctgagaagcctctttttcatcatatacaacatgaccgctcatatctgccacaacattcacaccatttgcacgatgagtggtcaaatccggagctttatctgttactaactggatggtgtaaacagcctgatccaaagttgtacgagtcaagtacggataagaatgatcaaattcgatgcaagtatgcaaagtaccgtttacggcacccttgatgtaatcaacaccgccggcagttaccacccaaccgtctttcgtgttcagtttgctcagcataacagcaacggggccttcttcctcttctgtagccagctcagaattacttgcgcttaaaccttttgtgcctgttgcaatatcagaagaagagataaactggcgtgcgacaattgaatttctccaatacgtatcggccttatattctgcatctgtcataactgaagcgttcaacggttcgataagtaggctgtcttcagtcgggaaataagtcagacggaaattgaaacgagcatccacatacagaccgttcttcatatccggtttcttattggccaaatataattcgggagaattggatgggttttccgtagcttcttcccaacgagcggtgtcgaccatcaaatacttatcgttcttagccggatcagcatcgatctgagcctgtaaacggatggggaaacgacgggccatttcggcttgtttctgataagcagattgccctgctaagccatctattttcagtaattcagttaacgttgacaccaaataattagatgcatccaaacgagaatctgaaacaagtttttcgccttcagcatccaaccatccatcgatatctattttagcctgctctggataatattcagtataatcagccaataaagcaacagctaagttataagccgaggttaatctatcctgcaaagatgttgagctctttgatttttcataatttttataagcttcctcaacaccagtcaatgtttcacgagattggccattattccagtcacctccagtcttattgttcgcccactggtcataataattatcagtcaacttaaatgcgatttcaatactttctttctgctcagttgtcaacgaagctgctgctttagccaataacgcatttacaatcgtttcgtcttcaacagcaatatacttataagtgtctaatgtgctgttgtcttccggagacatagccgttctattgccaatacccgtcggagtcataaagttgaaaccggcagcaccatctttctgagcatcgatcatgcgattgatgtcttttgcgtttaacacaacagattctgcaacaaccggagtcaatgtcaaagcctcacaagaagtagccttatttcctgcttcggcagccgtataaacagcggcaactacttgatttcctgaaatattcagaccatactgattagcagcagtcctagaagacttcttcaatacgatgtatttgtccgaatcgtggaaattagcatacagaatttcatttgccagcttctgtgtattgtctacgttagaagagaaccaactccactcaacattgcaaccttccagaatagaagcttccaaatctgcagatgcagcagtcgtagcgattttatctttgccataagctgttttatgatcaaagataattcctaaccctgtttccttgttcttaaaggtaaatttgccaccagttgctccgtctttcttatcataagaaatctgccacaaagaatagtttaaaggagctttatcagcatccacaatacggagagtcacttcaccggttttaaaatcgcgttcttggatcaaaacctgatttttttcctcaccaacacgtaactgataccatttatcagcctcaattttgttcacttcagaacctaaagttgcattgctcttagttccgaaagaacgataagttaacccagtcgcacaaggagtaacctggccataagcatcgcttacgggaaaattacttacctgtgctaccgcagagaatgccgttccgaaagccaggcatcctacaagagtagaaaactttttgttcataatcatttaaattaatattaataatacatatactaaaagttcgatcagcatcacgtacgtccctgtgttttcgtcttttaactaaacttctgtattttgacgagagaaaacgtacgttttttttagtcatttttgaggggctttctggagggtttgtgttggaaagtcggtttttcgtacttgttaagttatctgattgataagaaagaatatagaaaagggaaaataattggaagaaaggattgcaggtttaaaaagtagttgtatttttgtgcagtgaaaatggcgaacaaaaacgtacgttttcattagtcattttgaaaaacacctctatatcactataatacaacaacttacgaacacaaaatcaagtatttgttatatatgtacgcatgtacattagttaaattgataacagataggttatcagacagatactacaccttagcacactcaaggattccactgaaaaaaaagagaaaaacaaggtatttttgcagaatagcgacttatgtgttattttttctttcagtcaacaactattattaaagattatatctcaatagtgttgatttgtttcttggcaaatttgaaacatgaaagaagatctatcggtgagcaaacggacaaacctgtggaaaggttcaaatattcttacaattgttttattattccataaacttattattgattacgaaaacaactgtcatactatcatgctttgcttttaagatcatgaatatcaatatttacatgagatgatagtaggcatgacggatggtttttcaactatcataccatcatggatacaatagcttttttacacgtagcatatagcttattttcaacaatatagttacatttttttgtcgagacccgggtgtccgacaccggcaaatccgggtctcaagactgctcagatggaggtgtaaatggccctgatatgggtattttgaggaaaagatctaacgtctttcattaaaaaaagtaacgtgttccggaaaaaaggcttatgctttccgcaaaacattccgtttttaacgcttttggagtatgtctatttcgagtaaaacggccgaaatgatagttaaacagctgatttatgatagttgcatgatagttgaaaagggaactatcatatctatacaatatgatattcaatgttcacacaagaaacatgatggtatgatggagaatttgtaaataatgggagtccgtaggggcggggttactccgcccattaggaatcaacatcaccataattaaatggcaataggcagaacagaatccagcccctacagaaaaatccccgctcttattcgaccgggtctccaaacagagttgcggaagaggcgcggtttatgcgtacttttataaattgtcctacgcgataattcttcttgtcaaaaatcacaaccttattctggctggtacggccgaacaactgttcgcgcgaacgtttggagaaaccttcgatcagaacctcgaacactttgccgatatcacgcttgttactttcttccgaaagctggttctgcaagtcgatcatgccttgcaaacggcggactttctcttcttcactgaccgtatcgggaagatgctgggccgcataggttcccggacgctcggaatatttgaaaagaaaagcactatcgtagcctacttcacgcatcagggaaagcgtttcttgataatcctcctccgtttcggaatgaaaaccgcaaaacagatcggtcgagatagcacagtccggcaggatacgacggatagcggcaatacgatccagataccattcgcgcgtgtatttacggttcatcactttcaagatacgggaacttcccgattgtgcaggaagatggatcatcttacatatattgtcatgctcggcgatcacgtgcagggtttcatcgcccatatccttcggatgcgaagtggtaaagcggacacgcatttcaggcacttcctcggcgacacgcttcagcaaggcgggaaacgaaattttctccccctctttctcaaagagataagagttgacattctgccccagtaaggtcacttccttaaaacctttatcgcgcatatcgcgtatttcgttcaggatactttcgatgtcccggctgcgctcccttccgcgggtatacggcacgatgcaataggtacagaaattattacatccgcgcatgatggagacaaagcccgaaatatgcacgcctcccaatttcaatgggatcacatctttgtaggtttcctgcgtggaaagttctacattgatcgccttttcgccgtgctcgaccgcccccaccaggttcggcaggtccatataggaatccgggccgactaccaaatcggcatgatgcacttcgatcagctcctccttcactcgctccgccatacatccgagcacgccgatcactaaagattttttctttctttttaaagactggaaatactgaagccgtccgtagattttctgttcggcattatcgcgaaccgaacacgtgttgacgaaaatagcatcagcgtcttcaatcttgtcagtcactgcatacccatccattttcatgatggaagcgactacttcgctgtctgccacattcatctgacacccgtaggtttcgatgaacaacttcttttcttccgttacggctgcggattttaagtccacgccattctcttgattcgtcatcttatttactaattactgttaaatataaatgtttttgaaaaataattcactaaacacttgcacagtcaaaataccacgcttatatttgtaatcgaaaaacgtaaattttttcatagttaaggttttggttaaatcgaataagggtggctgtgaagttacccttatttacttttatacctattatatgtatcctttctttcacttctaaataatatttcctacatttggagtgcaaaaataatcaaagtttatggataacgcaggtgattggctatatattgtgttcctgataattgcagggatcagcagtttgttcggttccaagaacaagaaaaaacgtccgaaacagatattgggacaaccggacagggaaatcgtcacaaacgaagataatgttcccgacaaaggcttttgggagattctggaagaaatgcaaaatccgaaaccggtaaagcaacctgtacccacacctaaaagaaaaaagaaacaacaacaagttgcagccccctcaccatttcttgccgccgaaaaagtgacagacaaacaatctcctgccggcgatcgccttgtcgttccctcaaccgaagaggaaatcccacttacggatatcgagttcgacaatgccgccgaactgagaaaagctgttatttacactgaaatacttaatcgcaagtattaatctatagtcttttttaatacctttgcgccgcactgttaactgaataaagtattactaaattaataatatcatggctttaaaatttattacagctgaagaagcagcttcattcgtacatcacgacgacaatgtaggctttagcggatttactcctgcaggatgtcctaaagttgtgccgggcgccattgcaaaaaaagcaattgccgaacatgaaaaaggaaacccgtttcagatcggtatgtttaccggcgcttcgacaggcgacaagctggacggcgaactggctcgtgccaatgcaatcaaattccgtactccgtatcagtccaacaaggacctgcgtgccctgctgaattcccacggtgcacagtatttcgacatgcacttgtctgaactggcacaaagcctgcgttatggcttcttaggcaagatcgacgtagccatcgtcgaagcagccgatgtgacggaagacggcgaaatcgttccgacaagcggtgtcggtatcctgccgacaatctgccgcatggccgatcgtatcatcatcgagttgaactgccgccacccgaaagaaatccgcgggatgcatgatatctatgaaccggctgatcctccttaccgccgcgaaatccccatctacactccgtccgaccgtatcggtagcgactgtgtgaaagtcgatccggctaagatcgtcggtgttgtcaagaccgacgaaccgaacgaaggcggcaagttctctccgctggatgacgtgacaatggctatcggccagaatgttgccaacttcctggttggcgaaatcaaagccggccgtctgccgaaagaattcgttccgctacagagtggcgtaggcaatgttgccaatgccgttttgggttgcatgggcgaaaacaaggatattccggcattcaacgtttatacggaagttatccaggatgccgttattgctttgatgaaagagggacgcgtcaagtttgccagcggttgttcactgtctgtcagcaacgaagtgatccgcgacatctacgcgaacttggatttcttcaaagataagattctgcttcgcccgcaggaaatctccaacaatccggaagtagcccgccgtctcggcctggtggccatcaatacggctttggaagccgatatattcggtaacatcaactccacccacgtatccggtacaagaatgatgaacggtatcggcggttccggcgacttcacccgttcggccatgttgtccatcttcacgactccgtctacggcgaaggaaggcaagatcagcgcattcgtaccgatggtttcccacctggatcacagcgaacactccgtcaaagtcatcatcacggaatatggcgttgccgacttgcgcggcaaatctccgatccagcgtgcacgttgcatcatcgacaactgcgtccatccggactacaaaccgttactggaagaatacctggcaatgggtatcaagggacacacgccacagaacctgaaatgttgcttcgctttccacgaagaactggcagccagcggcgacatgcacaatgttgactggagtaaatacaacaaataatcgttgtatcatatatacagaaaagggctgtgtcaaaactccgttttgacacagcccttttctttagaagttccgcctcaaccacaaagagaaaaagcgatcgtaaaccatgtaaaagtttccttcttttgttatgaagtccttttccaacagccctcttaaagccgattgaaccgaactgcttgacggcaagctgtatttatggataaattttccggaagtcagtgccgttgctttcccttctttacaaatggcaatcatcagctctttctgcttttccggcaattgataaagcaactcagaataggtaaaggaataagaatccaaaatgaaatccactgcctgttcaatcatctcgccaccgcacacctcccctttcggagtcattgcaaaaagaatattcaatatcttttgcagataccaagtgattccttcaaaacgattatacaaagagtcaaagactgtaatatcaatattcttttgcgccatcctgaaatgatgttgtacaaactccatgtatttctgtttatcgattgccgataaatgcaggatagatacactctgataaaaaggacgggcaggactaataaacatttcacccatcaaatgacgttgtgaaccggcaaatataaaatgagccttgtcgcaatgctggacataagtacgcaacaaagcctccgtattcttttccggatattgtgcaacctgttgaaactcatcgatagcaataatacaaggcttatcagatacagccaaataatgaaaaatttcatccaaagtcgtttccggcgacttgatatcgcccaattccaaattccattgcggcattcccgacatatccaatgaaaaaccggcctttaaagagaccaaactattaacaaacaactcccaagccttttgtcctttcggttttaaagtcgccaaaattacttttcctaactgaaaaacgaactctcggagtgtcttggtcgcataaatatcaatcaggaaggtataataattttcctttatttctttcaaatggaaacaatgctggattagcccggtttttcccatacggcgggtagagatgatggctacattgttttcattgaccagccaacgaagcaactcttcggtctccctctcccgatcacagaaatattcgggagcgatgtaaccacttgtaacgaatggattatttaacaatgtcatgttgttttctttttacgcaaagataattattatcttataataatcatcataacgtaatcagattccgatttagagtcctaccctaaaaaaagtcctttcgaaagaaatctgaatttctcccgaaaggactctttttaacgcagaaaggcaataagagccagtgcgaccttatcaaggttgtttaccgatataagccagaataccgccatcgacatacagcacatggccgtttacgaagttggaagcgtcggaggcaaggaatacggcaggtcccatcaaatcttcaggagttccccaacgggcagccggagtcttggcaacgataaaggcatcgaacggatgacgggaaccgtcagcctgtctttcacgcaaaggagcggtctgcggagttgcgatataacccggaccgataccattacactggatgttatattcgccatattcggaagcgatattgcgagtcagcatcttcaaaccacctttggcggcagcataagccgatacggtctcacggccgagttcgctcatcatagagcagatattgatgatctttccgtgtcctttcttgatcatggaagggataactgctttagagacgataaacggaccgttcaagtcgatatcgatcacctggcggaattcggcagccgtcatttccaccatcgggatacgtttgatgataccggcgttgttcaccagaatatcgattacgcctacctccttttcgacttgtgcaacgaaagcattcacctgctcttcattcgtcacgtcgcaaacataaccgtgagctttgataccttcagcttcataggcagcgagacccttatccaccaattcctgtttgatatcgttaaacacgatagtagcaccggctttagcgaacgcagtcgcaatcgcaaacccgataccgtaagaagcacctgttacaagtgcaaccttaccttccaatgaaaaatttaccataataataatatattaatgtccgaaattcattacttcaagtcagagatcaaagagaaatcctgatctccgtaatccaggttttcacctcccataccccaaatgaaagtatagttgtgagtggcagcagcactatggatagaccattcgggagacaaaacagcctggtcgcctttcatccagatatgacgggtttcatccacttcgcccatgaaatggcagatagcctggtcttcagggatatcgaaatagaaataagcttccatacgacggctgtgcacgtgcgccggcatcgtgttccatacgctgcccggtttcaattccgtcatacccatctgcaactggcaggtaggaaggacttgattgacgatcatcttgttgatgttgcggtcgttggacatttccaaagagcccatagcggcaaccacagcgtcagccttcgttacttttttatccggatagttgcgatgtgcagtcgtagagttaaaatagaatttagccggattcttggcatccttgctttcaaatgtcacttcacggtcaccggaacccagataaagagcctccttaaaatcgagttcgaagacagcatccccagcttttacaacacctggtccgcccacattgaagatccccatttcacgtcgagtcagaaagaaaggagctttcaacggatcgattgcttccagaaccagtacctcgccagtcggcatagcaccaccgacgatcatacggtcgtacatcgaatagaccatattcacttcattcggagtaaacaccttttcaatcagaaagtcacgacggatacgtttcgtatcatattgctttgcatcttccggatgcgcagcataacgcaattcataatttgttttcatcttcttatagttgtattattttttaatttttaattcttaattttcaatcacttgatcgcatggtcagcctgcaccttctccccgttccaggctttcacattcgtccattccgtataaggggcagaccagaattcatccgtctccggcaatcccagaggcactaaaccaaaagcacaaagatagacgctccccgtattgatataagactcggagatctcgatttgttcacctgtaaagcctacgcgcaaccagccgttcttgtcgaaatttgacggagacttcaactggcgacgaatgacggaagtcaaagcgcaacgcacctgcgccggtttcacccgttcgggcaaaatatgcatcaaagcagcttgtcctaacgcatggaaaacaccgaaacggtagcagatggaacgaccgacaaccggaaaggaaccttcgggagaaataaaacgttccagtatctcggcataacgagcatgacgtttcaactgtgtatccaagaaatcagctccctcgatattatgtttcttcatcacgaccagcacgtccgtctgcatcggatgaattacgaaactattataatagtccatgtgaaaatcaactccatcaccatacatagcatcccctttataccattcgtcacggaattttttcactccatacagcatccgttccatgtcacattctcctgtaaactccaacaaagcagcttcgacggtcgaagcaaaaagcagccagttgttttcaaaaggcttgatattacggctacgcttcaattcggtaatcatccattcttttgcctgcggatcaagattcccccaaagttgtttcggagcacgcaataatccctgagccaaaaaagcagcatctaccagaggttgcgacggttcaccgaaaaccagatagtcgggagccccaggattaacagcattcttcaagccttttaccgtcaggttgatatatttctcacggagcttgccttccggcgtattgtccggtcccagttccagccagggagcgataccgcagaccagacggcccaccgcctccaaatgcgagaaacgacgacggtcgcccaacgattcgtaaggcatattcttcttcaacgtattattgctcagattgacaagtacggggtctgcaatgcgtgtcagattttccacccagaatgcacgatcttctttacctgttgtttgctgggcgttgcctgtaaaaggcaggcagatcgtacatagaattagtacggcgattttcaatgaatttctcatggtttatattcaaattaattttttcagtctcatcaatgcttccacataatagtaatcggcatagctaagcggcacgtccacctcgctgtttccaggcagatggccggtcgaatgcttgagtacaaagttacagtttgttcccttctccgccaaatattcaggggatgataaagaacgcacctgctgttcggcaaagtccagatagctttttgcctcatccgatttatccaactggctcaattcgatcaaagccgaagccatgatagcggcagcagaggcatcacgcggcgcattcgggatattaggagcgtcgaaatcccaatacgggactttatcggcaggcatattcggatggttcatcaggaaacgggcaatatgcttggcctgtaccagatattcgggactgccggtttcacgagccatcatcgtatagccatagattgcccatgcctgtccgcgtgcccaagccgattcgtcggcatagccttgatgcgtcattttgatatggggttttccggtgatggtgtcatatgaaacgacatgatagcagctatagtcatcgcggaaatgattttccatcgtcgtattggcatgcgtgaccgcgatatcatggaaacggttatcgccggtagtcttgcttgcccacgtcagcagttcgaggttcatcatattatcgatgataaccggatactgccatttaccattattggtaaagtcccaggaacggatcgccttgatcatagggttgaaccgggtactaagcgagccggcgcctgtcaccagcacatccttgtaagcgggattttgtgtcagccggtaaccgttgccatagctacaataaagcatgaagcctacatcgtgattatccgtcacatgctgcactttttccaagcgttcggtaaaaagtccggcatacttcttcaattcgggagtaggattgttttcatacagataccagagttcaccggggaagaaaccgctgcaccaccaatagcagtcgctggtttccagtttgccatccttaatgctcttaggcagccggccatcctgttgttccagctctttggccataagcagcgcctgttcggtcgaggctttcaaaccgcggtcaatcactttcgcaagaggttcctcctgcggggcattactacaagacgacaacagcagtgtggtcgctaacacagataaacttaaaagtttgttcataatcgaataattagaaagattttggacaaatatagggataagtttacaaattactgcgtattacgatagaaaagcgattggtatacatgacgaagccccgaaaatgtcatttcatctccggggcttgtgtcgtatcctgatcttggttggcctttttcccccccctggtttcacatccacctatatatattttcaagtgaaaaataagaaggctacaataataactaataaacaaatacacaagtatttactgccatcgctaccactccttacgttttcgcccttagtcaaaaaggtttttgacctgtgtcgaaagggcttttgaccaagggcgaaaacgtattcgactaaaggcaaaaggtttatgaccgggctgtttgacaacagaaaccatagctattgtcgcttaaacagaaccatccgggaccgacttgatctctgatgaaggcaaacataagcagtgaagccactttcactgtcaaacctgcatttaaccggttccgctttttcttaaatacagactatttcttgaaatacaaacgtaacaatatcgtaacatctcattcaatcccatgtaaccgcttcgtaatatttgtttcgttcctttgcaggtggaataaaaaggtaaacaaagtgagaaaatttttcgaaaagattgtagaaggggggttactcatcagcggaagcgtcagcagctttacgattttgctgatcgtgttctttctgttcaaagaggccggcggccttttcaatactccggccacagaagaaggctatgttcttgccgtaaataaaagcaacgatgtcggaaaattatcaccggagaagatcatggacattttcgacggtaatataaccaactggaaagatatcagcgggatggatcaggatatcctgatattccgtttctccgatctgaccaactattatacggaggaggaactgggcgacgaatttcaatacgtcccgcaaaagatcagcgaactggtggcgaaagaaccaggtatcatcgctttcttccccaaacagtatttactggaaaaagggttccagggaaaggtactgccggaagagaagatcacattaggggagttcttcggagggacgaaatggtatccgacctcgacaccggcccctatattcggattgattcctttgttgttgggcacattactggtcagtatcggcgcaatcgtactttcacttcctttcggaattgcggttgccatctacatggcggaaatagcgaacaagcggacacgcgacctcttgaaacctatcatcgaactgctcgcgggcattccgtctgtcgtctatggtttcttcggcttggtggtaatcgtgccgctcatacagaagacattcgacctgcctgtcggcgaaacggcttttgccggcagcgtggtcctggcgatcatggcgctcccaacgattatcaccgttgcggaagatgccatgcggacaacaccccgcgccatgaaggaggcaagcctcgccttgggtgcgacccaatggcaaacaatatataaagtaatcatcccatattccatttccggcattacatccgcagtcgtgctgggtatcggacgtgcgataggcgagacgatggcagtcctgatggtaaccggcaatgcggccgtcatcccgacctccttcttcgagccggtgcggactattcccgcgacgatcgccgccgaactgggagaggctcccgccggaggcgcacactacgaagccttgttcctgctcggcgccgtcctcttcctgatcacgttgatattgagtatctccgtcgagtatatttcatctaaaagaaaaatctgattagcattatggcacctgtacaaaagttaggaaatatagatttaaagaaacggacctcccaaaagtttgcattcggtttcttcaccctgttgagttatctggtcgtagcgatcttgttcgtgatcttaggcttcatcatcatcaaaggaggcagcgtgatcagctgggacttcctgacgaaagcgccggaagagggaatgacgaaagggggaatcttcccggcgatcgtcggaaccttctacctgatcgtcggaagcagtatcatcagtttcccgatcgggatcatgagcggcatctacatgaatgaatatgcgacaaacggcaaagtggtccgcttcatccgtatcatgacaaataacctgagcggagtcccgtcagtcgtattcggtttgttcggtatgtcgctgttcgtcaatgcactgggttggggagattcgatcatagccggttcgtttacgctggcattgatgtcgcttcccctgattatccgcacgacggaagaagctctgaaaagtatcgacgactcgttccggcacggtagcctggctttgggcgcaacgaagttacagaccatccgccgtgtcgtgcttccgatggctttcccgaatatcatcaccggcctgatcttgtcggtcggacgcgtatcgggcgaaacagctccgatcctgttcaccgtggcagcctatttccttccccaattgccgggaagcatcttcgaccagtgcatggcactgccttatcacttgtatgtaatatccacgagcggaacggatatagaagcctcccgcggcatggcatacggaacggctttggtgttgattgccatcgtcttggttgtcaacctgctggcaaatctattgcgtaattatttcgctaagaaagtaaaaatgaattaattgaaaattatttatgataaagattgatgctcaaaacgtagatttccattacggagactttcatgcgctgaagaacatttcgatgcagatagaagccaacacctcggtagcctttatcggcccgtcgggttgtggcaaatctaccttcctccgtttgttcaaccgcatgaatgacctgatccccgacacacgtctggagggtaagatattcatcgacgggcgggacatatacagcaaaggggaaaaagtcgatacgctccgtaaaaacgtcgggatggtgtttcagaaaccgaacccgttcccgaagacaatttttgaaaatgtggcttacggtctacgcgtaaacggcattaaggataacggatacatcgaagaaaccgtagtcaaaagcttgaagcaggtcgttctctgggacgaggtcaaggacaagctgaaagattcggctttcgctctttccggcggccagcagcaacgcctttgcatcgcacgggcattggccatctcaccttcaatcctgctgatggacgagcccacttcagccctcgatccgatctctacaggcaagatcgaggatttgatccatgaactgaaaaaggaatatacaatcgtgatcgtcacacacaacatgcagcaagctgctcgtgtaagcgacaagactggatatttttatttgggtgaactggtcgaatatggtgaaacgcgtaagatcttcaccaatccggaaaaagaatcgacccagaattatatcacagggagattcgggtgagaagatttatgatttatgacttatgatttatcatcgacacataaatcataagtcataatccataaatcataaattataaatcataaattataaatcaaaacatgaaggttattgaacaagaaatagcggcgttaaagaatacgatcaacgagatgtgggcactcgtccaccagcagatatacaatgccggtgaagcgatgctgaccggagacaaggaactggcctacaaagtgctcagccgtgaacgccgcgtgaatgcattcgagctgaagatcgacagtgattgcgaggatatcattgccctgtacgcaccagtggctatcgacctgcgtttcgtacttgccatgtacaagatcaatacaaacctggaacgcctcggcgacttcgccgaaagtatcgcacgcttctccgtcaacctgccggaaggagaaccgatcgatccggaactggtaaaaatcgcacgcgtagaagaaatgttacacgaacttctcggcatgatatcattggctcaggaagcctttgaaaaggaaagttccgaaatcgcgtcacgcattttcctgaaagacaacatcatcgatgagatcaatcacgattcgactcctctgatcgcccagtatatcgaagcgcatccgggcagcgcacttgccggcctttacatggcgggcgtcatccgcaagatggaacgcttcggcgaccattgcaccaacattgcagaagaactgatcttctacctggatgcgaaggtgatgaagcacatcggcaaaacggaagaaaagtaatatctttgcagccagaatcaaacataatcgtaatcgacaatgaaacgactaacggcattctggctgtcagcctgctttttatgcactatttccgtacaggcgcaatcatttattcccgaacgggactcctccgatatttccctgttcgaatatgcaacgaagattcccaagcgcaataatgtattcaacctggatctggaaatgcacgcttctttcaatactttcttcaccgggcacaagctggatgaagctgctttccgtttcaaccatatcaagatcgaggcgaccggcgaagtaaacgaccgtcttttctactggtaccgccagaacctcaaccaggggaatgaaggcatggatctggagaacctgccggaatcgatcgaatatgcgatgatcggctatcgcctcaacgataaattcacgattaccttagggaaacaggatgcagcctggggagggttcgaatatgacctcgatccgtatgctatatatgaatacagcgacatgaacgaatacatggattgctattttacaggagtcacgcttggttatcagccggctccttcccaggaactacgtttgcaagtaacagacaaccgaatcgggagcatggtagacgcttacggcctgcttcccgccggaatcgaaaagccacgcgctccgcttttctacacatttaactggaacagcagttatctggacgagattttgaacctccgctattccgccacggtcggagaacaggccaaagggaaatggatgtatatggcatgggccgggcacaatgtttgcaccggcccgtttgacggctatttcgatgtgatgtacacacgtggctcactcgatccgttaggtatcctgaccgagttagtccctccgtccgccgagaatgaggaaggacctgtctgcttgcgtaacatccagtatctttcactcgtggcagagatgaattaccgctttcatccgaaatggaacgccttcgccaaaggaatgtacgaaaccgggtcggtctataaagcgggagatgaagaagaagaactcccggacgggaaataccgtacggcatggggcttgcagaccggcatcgaattttatccgatggcggatgaaaacctgcatatcttcctcaccggaacagcccgcttttacaatctgacggaaaaagcaaaagcgctgtgtgcttccattgaaaacacacaacgcttgtcggtagggttcatatacaagttgccgctgtattgatcaaaacatcagtaccaactgatctccagcctgcaattcgactttcaacatgccgtcgacaaccgggagagatacggctttttggttgatcttgatgcccatattcgccgaatcggccggaagtttgatacggaacgaaccgggaaccagggctttcaaaccggcttccgccaagcggccttctttccatttggcagatacttcgccgcctccgcgaactttcagtcctttgaaactgccgcttttccaggcggaaggcagggcgggaagcagttcgatttctcccgtctggctctgtaccagcatttcggcaataccggcacaaccgccaaagttaccgtctatctggaaaggaggatgcgcacaaaacaggttcggatatgtcccgccgccgttcgtcatatttgtcttacggtccacacacggacggagcaggtcggcaaacaacttataggcatggtcgccgtcatgcagacgcgcccagaaattcatcttccaccccatcgaccatcccgtgctcttatcgccacgggcaatcagcgacttacgggcagcttcggcaagctcaggtgtacgctccgttgatatctcattgcccggatacagtccatagagatgagacacatggcgatgatgaggttcaacctcttcgtagggttcaagccattccatgatacgcccgtccttgccgatcgtcgtcggcatcaggcgggcacgcttggcagccagttcgccggcgaaagcagaatcaagtcctaatatgtcggcagcctcgatcgtattggtgaacagttcgcggacgatctggttgtccatcgtcgaaccggcacagatatgagccgtcttgccattcggcaacttataaccgttttcaggcgaagtggtcggggccgtcaccagatatttgttgcggggatcttccaccaacatatccacaaagaacagggaagctcctttcaaaaccggatacacatctttcagatattccttatccaacgtataaagataatgcatgtacaaatgttcgcaaagccaagcggcggaagtattggttgccccccatgacggatgttcgcccggtgcagtgaactcccagacatttcccaagatatgcgtcacccatccacgggcgttataataagccttagcggtccgttcgccactggcaacctgttgtttcgtccattccacaagcggaagatgaagttcggaaaggttcgccacctccgcaggccaatagttcatctgaagattgatattcaaatgatagtcgccgttccagggcgtattgatcgtattacaccaaagcccctgtagattgggaggcagcaagcccacacgcgtggacgagatcagcagataacgaccgaactggaaataaagcgcagccaacgaaggatcgtccgggttttcgtggaaagcagccaaacgctcgtccataggcaagtcttcgcgggaagaatatcccaaatccagctccacacggccgaacagggaacggtaagcagcaatatgccctttcttcaaagaggcgaaatctttcttttcggcattagccagcagggaagagaccttcccttccaaatccttatcaaaataatcggttgccatactcaccaacaagatcgcttcggaggcattccgcacggaaacagtcgaatctcccggagtcacatttccccctttcggcaggatgacgcggacacgcgatgcatagcggaggcctttcatctccagcgtatcgacaccgtcaggcaactgcccctgcatcagaaggtcattaccgtcggccgtcaccttataatgttcgggacggttcatcccaaacgagaagttcagcgccctatccgcatcggcagtcaaatgaatcacccccaaatcatcggcaaaagaggtaaagacttcgcggttatacgtcacctttccccttctaaaagaagctgttgcaatcgcgttgtcaagattcaattctcgtctatatccgaagatcgaatcggaagtaccttgataatcgtaattcagcacgaggttacctagcagttggtaactgccatacgggacatttgctccttgcccctgtccgctcccttcgcctttgcagacgaaagtattgtacatcagttcctgtgcttcgtcgttacgtccttcgaacagaagtttccggatcgtgcccaacgagtgatatgcctgcggattatctgtatcctgcttactgcccgaccacatggagatctcgttcaagacaatattttccgtgtcgacacctccgtccggcatcaatccgaggcgtccgttacccaacgggaacgatgcttcccaaattccggctggggcatcgaaatgataagacagcggtttgcccgttttcacttccggcatattgcatcctatcagaatcataaacagaaaaacaaatgcgttatatttcataattacaattatttgatatttcttcctgtaagtatatatatcagatccgtttgcggtataccttgctctataattccgaaaccacctttgtaatcccaattggctctcgcaatttcatacttatcaaacaactctatcatatcttgataccaacgttctttatcggcttttggggttgcggcgatacaaccaaattcaccacaatacaacgggagttgatgtaaacgggcaaaatcgaccacctccttgaaatgtttttcaatcacctctttgttaaattccactttattccaataggagaacttgtcatacaattcaccttttaagtgtttcaaatcttcatcagcaatcaattttcccggataatgcacctttcctgtatagtcttttacatccgtccaacctgccctataatgggtcaacaagaagggattataataatgaaaactaataatcaagttcggatcattctcaggtatcttcaaatatcgcatcgtttcatatccttgccacctattagaaccaacaagtaacgaccgttcgggttctaacagacgaatggtccgaacacattcagctacaatattattccactgttcatggtcgtcagctaccggttcgttcatcaattcgtaagctaaaaaatcgactgaataggtatgcaattcctgacttagttgcttccacaaatcataaaatcgaatctgctctttccgatcagtaaaaagaggtttttccttcgcattaaaatggtgcgaacgcaatatatgcaaatccacgattgcttttaaccgatatttttgacaccacgacaaagcattatgcagcaaagaaaaaacttctttttctttactgccatcgggcgcaaacatctgttcttcatccacaggcaagcgcaaatggtcaaatcctacttctgacaaaaatttaacatcagcctccgtaaaaaagacagctctattttcacctcttacattactttgtgacaaccaatgactgatattgacgcctctcttaaccgaaaaattgttctttttcggtgcagaaacaccacacatacaacaaagacaacaaatacaaatcaaccatgctttcttttccataaaactattatatttagattatcaacactttagctattattacttatcaaaaactttgcatatcgcacaatcttttataatatccatccaatgcaatcagctcctcgtgccgtccgcgttccacaatctccccttcatgcatcacgcaaatctcgtccgcattacgaatcgtcgagagccggtgtgcaatcacgatcgtcgtacggttacgcatcaggttctccaaagcctcctgcaccaagcgttccgactcggtgtcgagcgccgaagtcgcctcgtcgaggatcaggatcggcgggttcttcagaatggcacgtgcaatactgatacgctggcgctgtccgcccgacaacttaccgccgcggtcaccgatattagtatcgtatccatcttcgctcgccatgataaaatcatgcgcattggcgatacgggccgcctcttggacctgttcgagtgtagccccttccactccgaaagagatattattgaaaaatgtgtcgttaaaaagaatcgcctcctggttgacattccccatcaggctgcgcagatcgtacaaggtcgcatcacgcacatccgttccgtcgatcgttatgctccccttgtccacatcatagaaacgaggcagcaaatccaccaacgtgctctttcccgaccccgactggccgaccagcgctaccgtgtgtcctttcggaatcgtcaggtcaatgcctttcagcacccattcatgctggtacttgaaccagacatcccggtagcaaatactttccgtcagagcaatcggtttcggatcctcaggatcgttaatattgctttccgccttcaggatcttatcgacgcgatccatagaggcaagccctttctgaatggcataagaggccttgctaagatccttcgccggattgattatactgtaaaaaatcaccaagtagtagatgaaagtagaggcgtcgatcggactgttactgctcaggatcagcgtaccgccataccacagcacgatcgcgatcgtggctgtccccaagaactcgctcataggatgcgccatctgctggcggcggtaaatgcggttcgtcagccgccgaaacgtttcgttgcttttctcaaaacggtcctgtatcttcgcctccgcattgaaagccttgataacacgcaggccacccaacgtctcctctatctgactcatcagatacccccattgttgctgtccctcgaacgatttccgtttcaacttctttccgaccgttcccatcacatatccggcgaaaggcagcaggatgaagacaaaaagcgtcagctgccagctgatggcgatcatcccgatcaggtagatcaggatcaggatcgggtttttgaagagcatatcaagcgaactcatgatcgaagtctcgatctcgttcacatctcccgaaacgcgtgcgattatatcccccttccgctcttccgagaaaaagcccagagggagttccgttatcttgcgattgatctggttgcggatgtcgcggacgacacccgtacggatcgggatcatcgtataaaaagccatatacatcgtcccgaccttcaagaaagtagacacgatcaggaaaacacccaatatgatcagcgtgaaggaaccgcctttcgtctcgatcatgtcggacacgaaccaaaagaagttgtttttcagcaattccggagtcgctttccaggcttcgaacgagaaaggggcgaacgtccaatccgtataggtataggtttcgtcactgattttaaacaagatattcagaatcgggatgattaatgcaaaagagaacaggttcaaaatggcagacaggacgttaaatatcacattccacaccataaatttcttatagggaggcacaaaacgcctcagtatacgcagaaaatccttcatgtttgatcgatcaattgaatttggggcgcaagttactcaatatccggctgattccgggcattcccgctgtactttatttcgtccatccttattctttagcccgccagccctgctcttttagggcttcagattactctcataagtcgtccgccgccaagcagacaacttatggatcgtatccgaaaaacgaatctattccatagaagaatataatatatccaaaagaaaatgataaagaagcaactataaaaagtatatttgcatcaatatagtataaacaaatgctataaaagtatgaaaaagatctcttcctccttcctgaaaagtctcaattggctattaaccagcgtactaatgctgctaggtttctccacatgtgactctgaaccgggagccgccatgtacggtactcctcatgccgactttacaatcaaaggaaaagtcgtaaaccaagaaaatatgccgattccggatattgaaataaaatgtctggtagaacatcatggcgataacagacattggtttgacacgataccagctgtttccacagatcctgctggagtctttcattgccagtttgaagaatttccaaccgacaaattacggatcatagcaacggatatagacggtccccaaaacggttcatacgaaaaagactctacgaaccttacactttccagcgatgattataagggaaacacaggaagttggtttaaaggctctgtcgaaaaagaaataaagttcaaccttaaaagaaaagacaaagaatgaataaacgtcccggattacgcaaacgccttgcattagaattattcagaagcatccggaagaaccgagccaagatacatgaattgcgtacgctcttttgggagtgcacgctccgttgtaacgcctcctgcctccattgcggtagcgactgccatgtctcgtccgcccatccggacatgccggtcgaagatttcctgaaagtgatagacgaaatcacgcctcacgtggacccgcataaggtgatgatcacgtttaccggcggagaagcattggtccgtaaagatatcgaagcatgcgggcgggaattgaacaaacgcgaatatccctggggaatcgtctccaacggattgctgctcaaccgcacacgactggactcgctattggcggccggaatgcactccatcaccatcagcctcgacgggttcgaagaggcgcacaactggctcaggggaaaccgccggagcttcgaaggcgctgtcaatgccattgcgatgctggcagaagagaaggaaatcgtctgggacgtcgtgacctgcgtcaatcagaaaaacttcaaggacctgatgctgctcaaggattttctgatcgagctgggagtcaagaactggcgtatcttcaccatttttcctgtgggccgggcggcagagacaccggaattgcagatcgacgacacacaattcacttggatcctcaaattcatccgtcattgccgcgccgagggaaagatacatgctagttttgcctgtgaaggtttcctcggcaattacgagggggaagtacgcgaccagatttttcactgcaatgctggtatcagcacggcatcggtactgatcgacggatctatatccggctgtccgagcatccgtgccaacttccatcagggaaatatctacaaagacagctttgttgatgtctggaacaacggcttcaaagaatatcgcaatcgggaatgggcacgaaaaggacagtgcgcagactgcgacatgttccgctattgcgaaggaagcggtatgcatctccatgacgatagcggcgacctgatcacctgtcattatcggagaattgagaattgacaaagagcaattgacaatatctttccctccctaattatcaattctccattgtcaattgtcaattgtttcctatctttacccacgtaaactaaaaaacatcaatcatttcatgaaaaatgctcttatcctatcggccttgctgacattagggccggtctgtttcgctcaacagacagaaaagtatcctttgggcaattatgaggaacttacagacaccaaaccgcatgacggcgcagaagtctggaacaaaatgacaacgccaacctgcctcagctggggaacaacggatatccgctacaaaaaactgaatgtccccgacatcaagaagacaacccgctggaaagggaaagcctggaaaggggaacgcatcaatgcacaagccgtgttgtggactaaagaagcgttagacgacgtaacggtcaccgtcagcgaactgaaaagcggctcggccgtcatcccggcttctgccatcacgacgaacttcgtacgctatgtcatgaccgacgagctgaacaaggaccgcaaaggtggttgcggacatcgcgaaaacaaggccgaatgggattcgtctgtcgtagccgatgtcttggatattgtaaaaatacaggatatcaaagcttgtacgacacaaccgatctggctgaacgtatgggttccgtcagatgcccgcgcagggaaatataaggggacgttgaccgtttcaggaaagaatttccaagatatgaaactccaggtagaaatcgacgtgcagaaccgtatgctgccagctccgcaagactgggctttccatctggacctgtggcaaaatccctattccgtagcccgttactaccaggttcctctttggagcaaggagcatttcgacgccatgcttccgatcatgaagatgttggccaatgccggacaacgggccatcacgaccagcatcatgcataaaccttgggccggccagacggaagaccatttcgacagcatggtaacccgtatcaagaaaatcgacgggacatgggtatacagttatgacgtatttgacaaatgggtggaattcatgatgaacgaagtggggatcaaagatatgatcagttgctacaccatgatcccttgggctttgactttcgactattacgatgaagcgaccagccgggtacagtttatcaatgtcaaacctggcgatgccgaatataccgaatactggggttcgttcctgaaagacttctcccgtcacctgcgtaaaaaaggctggtttgaaaagactgccatctctatggacgaacgtcctatggaagccatgcgcgaagctatcaaagtcatcaagcaggccgatcccgaattcaagatcacgctggcgggcaactatcatcctgaaatccaatccgacttgtattacctgagtatcccttacggccataaatttccagaaaacgtaaaagccgaacgcgaacgcaaaggacagatcagcacggtctacacgtgttgctcggaagccttcccgaacacctttactttctccgatccggccgaagctacttggacagccctgcatgccatcgccggaggctatgacggttacctgcgctgggccgtaaacagttggacagccgatcccttgcgcgactcacgcttccgcacttgggcagccggcgatacatacagtatctatcctggcccccgcagttcgatccgtttcgaacgtttggtcgaaggtattcaggactgcgaaaaaatccgtatcctccgcgaagagctggcagccaaaggggctaaaggcaaattgaacaaattaaacaaagcagtggctaaatttaccccggaaggcctgtccgaaactcaacagtcggcagccgaaatggtaaatgaattgaataaattgctgaactcgctgtaagcattcgccgcttaaaaacaaaaaaatcataaaaaaatccccggagagtgcatgactcccggggattccttttatctttacagcatcggaaccgttagctcagctggtttagagcgctgccttgacagggcagaggtcgccggttcgaatccggcacggttcacactccgccataaagcgccaaccggcgcctttctttttacttttcccgaataaatacattaatcggcgttcccataaagttccagttttcccggatcttgttttccaggaagcgtttgtaaggctctttgatccattgcggcaagttacagaagaatacaaacgaaggaacctggccggcaggaagctgcgtaatatatttaatcttgatatattttcctttccaagcaggaggcggatagttctcgatgatcggcagcatgatttcgttcagcttggctgtcggaacacggcgctgacggttttcgtatacatctttggctgtttccagcaccttcagaatgcgctgttttgtcaatgccgaaataaacaggatcggaaaatcggtaaacggagccagacgctcacgaatcgcactcgtaaaggtatcaatcaccttttggcttttatcttccaccaaatcccatttgttcacacaaacgaccaagcctttcttgttcttctgaaccaaagagaagatgttcaaatcctgactttcgatacctcgggtggcatctagcatcaacacgcagacatccgaattctcaatggcgcggatcgaacggatcacggaatagtattccagatcctcattcaccttccccttcttacggataccggccgtatccaccaaatagaaattcaggccgaacttgttatatttcgtgtaaatagaatcacgggtcgtaccagcaatatccgttacaatatggcggtcttcaccgataaaggcgttgatcaaagaagatttgcctgcattcggacggccgatgatggcgatacggggcagctcttcttcgagcatctcctgcttgtcatccggaagcgtagcaacgattttatccaacaaatcgcctgtacaagaaccgttgatagcagagatacagaaagggtcacctaatccgaaagaataaaattcggcagaggagggatgcaattcgaagttatccgctttattggccacaacaatcacaggcttcttggcacgacgcaggatagcagctacttcgttatccaaatccgtaactccattcaagacatcaacgacaaacaagatcacgtctgcctcttcaagagcgactttcacctgcttgtttatctcttcttcaaaaacatcatccgaattaatcacccatccgccggtgtcaatcagcgaaaattctttacctgtccactctgccttgccatactgacggtcgcgggtagtacctgcttcctcgttgacaatcgcctggcgcgtctgtgtcaaacggttgaagagggtggactttcctacgttgggtctaccaactattgcaacaatatttcccataaacaactttttctgtctgtgctgttaattaatccagctgataaccgaagttcttcagcatgttgtcccggttacgccagtctttttctactttgacaaacatttccaggaaaaccttcttatcaaagaagcgttcgatatccttacgtgccatagcacctacctttttcaatgcctggccacgatgcccgatgatgattcctttttgggaatcgcgttcaacaataatgagcgctttgatatgaatcagctcggcttcttctttaaacagctcaacaacgacttccaccgcatacgggatttctttctgataatacaggagaatcttctcgcgaatgatctccgtcacaaagaaacgggccggcttatcggtaagcgcatctttctcgaaatagggaggagattcaggcatcagatcttctaccctacgtttcacgtaatctatattaaaattcgaaagggcggagatcggaatgatctcagctttcggaagaagttctttccactcggctaccagcttttccaattctggttgggtagtcgtatcaatcttgttaatcagtaacaggaccggacattccactttctggaccttctggagaaattcttcattcttgtcgatcttttcgacgacatcggttacataaagcaatacatcggcatcaccaagtgccgactgagaaaaattaagcatagattcctgcaacttataattcggatgcaggactcccggcgtgtcagaatacacaatctgcatatctgcggtattcacgatccctatgattcggtgccgcgttgtctgtgctttcgaagtgatgatcgagatacgctctcccaccaaacggttcatcaacgtagacttcccgacgttcggattaccgacaatattaacaaagccggatttatgcttgttttccattatacccccatttaagataaattgcaccccaggtaaaaccggcgccaaaagcggcaagaatcagattatcgcctttcttcagtttgtcttcccactcccaaaggcagatagggattgtcccggcgctggtatttccgtatttctggatattgatcatcaccttttccatgtccacacccagacgttttgctgtcgcatcgatgatgcgcaagtttgcctgatgaggcacgatccatgcgatatcatcgtgtgtcagcccgttccgttcagcaatctcggcagcaacatcagccatatacgaaactgcgtacttaaagacatatttgccatcctggaaaacgaaatgttcgcgattatccaccgtatcgtgtgaaggaggataggccgaaccgccggatttcataatcagatgtgaatagcctacaccatcggtacgcaagatcgtatccatcacacccacttcttccgttgtaggttcgagcagcacagcaccacaggcatcgccgaacaaaggacaggtagaacgatcttgatagtccgttatagcagtcattttatcgcctgccacaacaaccactttcttatagcgtcccgaacggatataattggaacctgtttccaaggcatacaaaaaaccggcacaagccccctgcaaatcgaaagtcattgcattcttgcaaccggtatggtaagctataatggaggaagtggtcgggaaatgatgatcaggcgtagtcgtagccgtaaggatcacttctatatcttccgggttcacatttgtcttttcgagtaactgcttcacagcccgtatacccatatatgaggttcccaagccctcacctttcaaaattcggcgttctttgatgccaacacgcgtcatgatccattcatccgtcgtatccaccaacttcgaaatatcttcgttcgtcaacacatcttcgggaacgtatccgcctacgcctgttattaccgcatttatcttatccatatctttaaaaataaaaaggactatatatcccaattaaaaaaaagccctaaaaatacttttagggctatttcttggtttatcaaaacttaatcagttaggataaacttacacagctgcttctttttcgatagctaacttacctctgtaatagccgcattcgccgcatacagtgtgataaatgtgccatgcgccgcagttcgggcaaatagccattgtgggagcaacagccttgtcatgagttcttctcttggctgttcttgtcttaccttgtcttcttttaggatgtgccatgttttaatttatttaattgttatcattctcaagtaaacctttcagaccatcccatctcggatctgttgccacaggtacgtcgtcatcaatcgcgatatcttcttccacgctatcgtcttcgtactcttcatctccgtcttcagtgcttctggcggtatgcttcttcaacttggacgacatagccttattacattttcccggagcatgtacatgcttcataggaattgccaatgcaataaattcatacaggaaccacgcgaggttaatagcaccttcgtcttccggtataaccactacttcgtcactttcttcggcatattctttaccgaactttaccaccaggcgattatgcgtgtcgattgggatttccatatcgtccagacatctgtcgcacggaaccataacaacaccttcaatctgaaagttcatttcaaacatcatggaagaccgttttaccgtgaggttaaccttcactttgcccttctggacttggtctccatcaatatccacaaaaaacttattctccaataaatactcgaattcgtgtattcctgaagtgagatttttcaaatctacattatataatttaaactttcccaaagccttttagtgtaaaaaccttgcaaaggtacgaaaaaactaaacacaaatgcaacatctttgcagttattttttactatctaagattttagcccttatatttccgaagctcaattcgaaaagtcgtgcctttgccgacttccgaactcttaacaaatatccttccgccgtgataagattcgataatacgctttaccagagacaagcctagcccccacccacgctttttggtcgtataaccgggattaaatacggttttaaacttagatttggcgatccccttcccggtatcggtcacatcgatacgaacgactttatcacgttcctccacctgaaacgtgatttccccctgcccttccattgcatctaccgcattttttgtcagattctctataacccaagcaaaaagagagtcattcatcaacaccggaaccggcccgtcggtaagatgcgtataaatcttgaccttcgaagaaatacgtgtgctcatatagctcaaggccgaacggatagaattattgatatccactgggactgggtccggattggaaccgatcttggaaaaacgctccgcaatcgtttccaaacgcttcacatctttttccatctcgttcaagagagaagaatctatatcttttgtccgcaggtattccacccaagctatcaaagacgaaataggcgttcctaactgatgagccgtttctttagacagtccaacccacactttattctgttcggccttcttcgtgcttgcaagcgccagaaaagcaatcacaataaaaacgaatacaaccgtaagctgcgcataaggatatatcaacaatcgctttaggatgacagaatcgtcataatagacatattggaaagttccatcctccatatcgatcacaatcgtatttttgcttttcagctcctttacttttactttcttaaattcttccacatcattttcggggaagcttatattctttacgaacatgatgctgtctttgtcattacaaagtacaaccgggatagtcgtatttccttccaggattttcaaaacaagagacaaatccacagccgtgttcttacttgccgtcaaacgagtagcctccgcccatacttccattttctggcgttcttcctgagccagatcttttatcagcatatcagaaacaacaagtgaagcgatcgcgatcaggatagccgtaaaaataaatacaaacttcaaccgttggcgggaatcatatatacttttcatatcgaaatattcagtcaatatatattgaacgataaagaaagaataatattatattataccagaagaagacggaaaaccaaaagggaaagggcagaaatactgtttaaggaataccctgacatccacatggcttattgggctgtcgggaacgaaaaaagccgactcaaaactgaatcggcttccttcacggagaactttcgctctcactcctaaaaaacggcggctatctactctcccacttttacgcagtaccatcgacgtggttgggcttaacttctctgttcggaatgggaagaggtggatccccaacgctataaccaccttaatacctctttgtaagattttgactggacaaccccattacctgaagtaactaatagaaacatatggcatcagccacctgctgatatatcaacccttacatgatcgaaagtctcgggctattagtactactcggcttcgacattgctgcccttacacctgtagcctatctacgtcgtagtctacaacgaccctctagggatatctcatcttgaggctggcttcgtacttagatgctttcagcacttatccaatccagacttagatacccggcggtgcacctggcggtacaaccggtaaaccagtggtctgtccaacacggtcctctcgtactagtgtcagagcccctcaaatatcctacgcccacgatagatagagaccgaactgtctcacgacgttctgaacccagctcgcgtgccactttaatgggcgaacagcccaacccttgggaccttctccagccccaggatgtgacgagccgacatcgaggtgccaaaccgctccgtcgatatgagctcttgggagcgatcagcctgttatccccggagtaccttttatcctttgagcgatggcccttccatacggaaccaccggatcactatgctctagtttcctacctgatcgacttgtctgtctcccagtcaagcacccttatgccattacactctacgaccggttaccaatcggtctgagggtacctttagaagcctccgttactcttttggaggcgaccaccccagtcaaactacccaccatacagtgtccccgcttctgcgggttagaactcaaacaaccaaagggccgtatttcaacggcggctccacaaacactggcgtgcctgattcatagcctccggcctatcctacacatcgattgcccaaattcaatgtaaagctatagtaaaggttcacggggtcttttcgtcccatcgcgggtaatcggcatcttcaccgatactacaatttcaccgagctcacggttgagacagtgtccagatcattacaccattcgtgcaggtcggaacttacccgacaaggaatttcgctaccttaggaccgttatagttacggccgccgtttactggggcttcaattcaagccttctcttgcgatgagctctcctcttaaccttccagcaccgggcaggtgtcaggctgtatacttcatatttctatttcgcacagccatgtgtttttgttaaacagttgcctggacctattctctgcgccctacctctcagtagggaccctttatcccgaagttacagggtcaatttgcctagttccttaaccgtgaatcactcgagcgcctcagtattttcaacccaactacgtgtgtccgtttacggtacgggtactttatgaatatgcttagcggattttcttgggagcctgattacgtccattttgccttgtgcaagcacgcggcatactatcaaggtcgactctccctgcggatttgcctacaggaatctacatctacactcttcaaccacctattccgtcagatggcaggactttcacttctccgtctccacatcgctccataaagtagtatgggaatattaaaccattcttccatcggtatcgccgttcggcttaaccttaggtcccgacttaccctgatccgattaacgttgatcaggaaaccttagtctttcggcgaggaggtttctcacctcctttatcgttacttatacctacatttgcgtttccaaaagctccagcaaaggtcatccttcaccttcgacgccgttggaatgctcccctaccatgtatttctacatccatagcttcggtaaacagtttatgcccgagtattatccacgccggactcctcgactagtgagctgttacgcactctttaaatgaatggctgcttccaagccaacatcctagctgtctctgcagtccgacttcgttagttcaacttaactgttatttggggaccttagctgatggtctggattcttctcctctcggacgcggaccttagcacccgcgccctcactccttatcaatatatagcacgcattcggagtttatctggacttgataggcggtgaagccctcgcatccaatcagtcgctctacctcatgctatactaaataaaggctgcacctaaatgcatttcggggagtacgagctatctccaagtttgattagcctttcacccctaccctcagttcattggaacacttttcaacgtatacccattcggacctccagttggtgttacccaaccttcatcctgaccaagggtagatcacttggtttcgcgtctactcactccgactatcacgccctattaagactcgctttcgcttcggctccgggcctgaagcccttaaccttgccggagaaagtaactcgtaggttcattatgcaaaaggcacgccgtcacactttaatgtgctccgaccgcttgtaggcagacggtttcagggactatttcactcctctgttcgaggtgcttttcacctttccttcacagtactggttcgctatcggtctctcgggagtatttagccttacgggatgggccccgctgattcacacagaatttctcgtgctccgcgctactcaggattccactaggcttcgttaaagagtcgtataccgggctttcaccgtctacggccgtttgttccaaaacgttctacttccttaatctcttgccacaacgtggtcctactaccccgacaatgcctaaacatcatcggtttgggctgttccgcgttcgctcgccactacttgcggaatcacttttgttttcttctcctatgggtacttagatgtttcagttccccacgttcgccttccttacggaatgactggccttccaccagccgggttgccccattcggaaatcttgggatcaaaggttatttgcacctaccccaagcttatcgcagcttatcacgtccttcatcgcctccgagagccaaggcatccaccgtctgcccttgcttactttctttatcactgacactgcttccttttattgctaaaattgaagcccgtgtcggattgatatatcttcagcttgctctattttttcgttactttacttttttgaagttgtccaatacgtcaaagatctttttttaccccttacggagtttatcgtggagaataacggattcgaaccgttgaccctctgcgtgcaaagcagatgctctagccagctgagctaatcccccgtttttcaactggtagtcccaggcagagttgaactgccgacctctacattatcagtgtagcgctctaaccaactgagctataggactgtcaaccgttatgtgcctgaaattttcatctcagcatcatctttctctctatatactggtctttccagtttaagatcatatatatatacatattcaaccgtagtaccagagagctacatacctcatcggacttaatctagagattccagctccagaaaggaggtgttccagccgcaccttccggtacggctaccttgttacgacttagccccagtcaccagttttaccctaggccgatccttgcggttacggacttcaggtacccccggctcccatggcttgacgggcggtgtgtacaaggcccgggaacgtattcaccgcgccatggctgatgcgcgattactagcgaatccagcttcacggagtcgagttgcagactccgatccgaactgagacatggtttggagattagcatcctgtcaccaggtagctgccctttgtccatgccattgtaacacgtgtgtcgccccggatgtaagggccgtgctgatttgacgtcatccccaccttcctcacagcttacgctggcagtctcaccagagtcctcagcttcacctgttagtaactagtgataagggttgcgctcgttatggcacttaagccgacacctcacggcacgagctgacgacaaccatgcagcacctcgtaatctgctattgctagaaagagtgtttccactccggtcagactacgttcaaacccgggtaaggttcctcgcgtatcatcgaattaaaccacatgttcctccgcttgtgcgggcccccgtcaattcctttgagtttcaccgttgccggcgtactccccaggtggattacttaacgctttcgctgtagagcttacattgtatcgcaaactcctagtaatcatcgtttactgcgtggactaccagggtatctaatcctgtttgatccccacgctttcgtgcttcagtgtcagttatggtttagtaagctgccttcgcaatcggagttctgcgtgatatctatgcatttcaccgctacaccacgcattccgcctacctcaaacacactcaagtaacccagtttcaacggcaattttatggttgagccacaaactttcaccgctgacttaaatcaccacctacgcaccctttaaacccaataaatccggataacgctcgcatcctccgtattaccgcggctgctggcacggagttagccgatgcttattcatagggtacatacaaaaaaggacacgtcctccactttattcccctataaaagaagtttacaaaccatagatccttcttccttcacgcgacttggctggttcagcctctcggccattgaccaatattcctcactgctgcctcccgtaggagtttggtccgtgtctcagtaccaatgtgggggaccttcctctcagaacccctatccatcgtcggtttggtgggccgttaccccgccaactgcctaatggaacgcatgcctatctatcagcgatgaatctttaacaaatattcccatgcgggacccctgttttatggggtattaatccgactttcgccgggctatccccctctgataggtaagttgcatacgcgttactcacccgtgcgccggtcgccatcaatctgtattgctacaaatcatgctgcccctcgacttgcatgtgttaagcctgtcgctagcgttcatcctgagccaggatcaaactcttcgttgttgattttgttttataccttttgctcagaatctctatctgtttattgtagtcttgacggtatgtcagtattcctactacgtctcttgtactacttgttgatatgtaatgctttcaaagaactttttttcgctttcccttagcgaacgtgggtgcaaagataataacttttatttttaacttccaaattttatcggaacttttttcaaaagttttttgtttcatcatttaaacacctgcgttctctctcgaatgcggatgcaaaagtagtgctttacaacatatccaccaaacatttctgcaactattttttcacccggttgctatctctttacgctaactcctgaacctctgaacgttacaactgcaacttttttatctctcactttacaacagtttatggatatacggaatgattttatagatctttataatgtacatggaaagacggtatactgataaaacatctatacttttggatttctcaaatcgtagtaatgaatttggaaactcattactataatgtatctttgtcaccatatcaattattcacctaaaaacttaattctaaaatggaatcagtaatgaaaagaacgacagccaccggctttttgtctacttgtgccatatcgttggccctattttcttcgtgtaccagtgttgaacccaatacacttacacccgaagaaatcgcagacggctggcaactcctcttcgacggcagaacattaaacggctggaaagattacaacggaacaaccctgacacaaccctggcatgtggttgatggatgcatccaagcaaaaggagacggtagcgacgcgagtggttatatcgtaaccgacaagcagtatgagaacttcgaattgtcttgggactggaaattgtccaaaggaggcaacagcggtatgctataccatgtagtcgaacgtccccaattcgcagttccatacgtcacgggaccggaatatcagttaatagacgaacctaacttccccgaaccactggaagaatggcagaagttgggtgtcgactacgccatgcacctccccgacaaggcaaaaatgaaagtaaacccgcaaggagagtggaataattcaaagatcgtattcgacaacggacatgtagaacattggttgaacggagtcaaaatcctagaattcaaagcctggactgacgattggtatgcaaagaagaacagcggtaaatgggcaaacgccccagaatacggcttggccaagaaaggtgtcctttgcctgcaagaccacggataccctgcttctttccgtaacatcaagatcaaagaactcccccgcaagacaaaagaagtgacgctattcaacggtacagacctaaagggatgggaagcctatggcacggaaaagtggtatgtagaagatggtttgctgatctgtgaaagcggtccggacaagaaatacggctatctggctacacgcgattactatgacgacttcgacctgacggttgaattcaaacaggaagcagacggaaactccggcgtattcatccgttcctttatcgaagaggatgttaaagtaaacggttggcaggttgaagtagctcccaaaggccatgacactggcggcatctatgaatcatacggacgcggctggttgatccaaatcccggatgaaaaagaaaatatcctgaaagagggtgactggaataccatgcgtatcaaagtacagggagacaatgtccaaacttggttgaacggtcaagagatggtcaacatcaacgatgaaaagatcggagccggacagggacgcattgctctgcaaatccatgacggaggcggtatcaaggttctctggagaaacctgaaagtaaaaacattataaattggacataaaatatagtttttaattgtttgtttgtttactttgatttaaagaaatgttatgaaaaatgtttcaagaagaagttttttgaaagtcagttctgctatggtagcaggactgaccattgttcccagctctatacttggcaggggggctggacatgtcgctccgagtgataaactgaatatagccggtattggtgtgggaggtatggggcgtcgtaatttagctaatatgagtacggaaaatatcgttgcactttgtgatgtcgattggcattatgcagataaaacttttaaggattatccgaatgctatacgttttaaagattggcgtgttatgtttgataagattggtaagtcaattgatgcagtcatggttgcaaccccagatcatacgcatgccggagtgactgctcacgctattacattgggtaaacattgttatacccagaaaccacttgcgcattctgtttatgaatctcgtttactgacaaaattagctaagaaatataaagtcgctactcagatgggaaatcaaggaaattcttttgattggtgtcgtcaggttgcagaatggatacaagcaggcgttattggtgatgtacgtgaagtacattgttggacggatcgtccgatttggcctcaaggattaatgaagcccaaagatgagtttgaatatccgaaaaatttagactgggatctttttattggtccagcacataaacgaccttataaccctgtttatacaccatggaattggcgtggttggtgggattttggaacaggtgcattgggtgatatggcttgccatattatggatccactctattgggcacttgatttaaaatatccaactagtgttatcgggagttctacattgtgcaatttgtattctccacctcatgctcaaactgtaacatatacattccctgaacgtccggcaaaaggtaatgtgaaaatgcctgaggtaaaagtgtattggtatgatggaggattaatgccacctcgtccagaagagttgaaagatgggcaaatgatgggagatgaaaatggtggaattatatttgttgaggcgaagggaaagattatgactggttgttatgggatgaatccaactttgttaccggtttcagagatggaacattttgatcagccaaaacctactttggctcgtgtaaagggaggaaatggaaatatttggtcgactaatgctcatgaacaagattggattcgagcctgtaaggaatctccggaaaatcggatagaagcttcttctaattttcagttttcaggtccgtttaatgaaatggtggtaatggggattcttgctgttcggctatcaggtttatatggattgcatcgtgaattgcggtggaatagtgagaacatgcgttttacgaatattttttcagaggataaaataaagatagtgacggtagatgattttaaagtgatagatggagatcctcgttttgatcgtcgtttcgctgaattgaatgcagtagaaatggctgatgaatggattaaacacacttatcgtaatggcttttctttaccggaaatgccaaatgattgaactataatagatgaattatgaagaagttatttgatatttttttgttttttgtatgttttctttctgttacttttatagatgcacaaacgattgctgaaaagaatgggtggcgtttgggaatacagtcgtatagttttcaccgtttttcattgatagaggcattggataagaccaaagagctcggtttaaaatatattgaagtatatccgggacataggttaggggggaagtgggggaatcgagtttttgactttaatttggatgttcagagccaaaaagaattgaaaaagctggcggcttcaaaaggtataaagatagttggtattggggtttatgttgcggagaaatcttctgattgggaaaaaatgtttcgctttgccaaaaagatgaaaatggattttataacttgtgaacctgcatttggcgattgggatcttgtagaaaaattatcgaaacaatatggaatttctgtatcagtacataatcatcctcagccatctgattattggaatcctaaaaaattgttgcaggtaatatctaatcgcaatcatttacttggttcatgtgcagatgtagggcattggagtagagaagggcttgatcctgtagaaagcatgaaattgttaagtggacgtcttatatccctacattttaaagatatagctgcaaaaaaaaatagagaaaaagaacaacatgatgtgatttggggaacaggtatattggatatcaaaggaatattgaatgaattaaaaaagcagaattttaaaggattattttctatagaatatgaatataattgggaaaattctattcctgatatcaaagaatgtattctttattttgataaggttacctgtgatttgtttgatcgaagtagtgattgatttatttaaaagtaggaataggtcataaagttccctcgaataaggagataaacaactctacattcccgttcgggtttcgtggaatcttggggctatgcttgtctaatatctagggctcctaggtttctacatccgtaaagatactttttaagtttttacggcattgtttgaatgttattttaatactatacatctaatatttttgtcgctatgttattattattcagtcaaatatttgatcaagttatatcgaagtcatcttatttatctgttttcattatcgatgacaatacgaaggtaggacctcgttataggcaggaatacagtttcgggaatatcggcgaatatcggtgcggaaacgggaggaaacaggtagaatataggtgccattatgtttggaaaatcagtaattattgcttatctttataggacaatgaaacgatggggattatgatgtagaatgggttcgaagtcaagagttatgggtaagccttgaaacaagggacttctgcgtacgaaacaagggactttggtgtgtcaaaccatggagttcgggaggtgaaagaccggacttccggatgcgaaagaagggatttttctcgttcctgtcgtgtctttgctggtttaaagaggggcaaggaaatgagcttatatatattaatatatttattttaagatgtaggattgaaccataatgaacggaaaacctctgtaagccacttgtaatgagttgtttatattgtgctattgactgcaccgtttttatttggaggtaaaatgtttggtttaaacaggctctaagatgttgtttttgagatataattatttcggctatcggataaaaagattaattttgtagctcagtgtgatgttgttgtcgcattgagctaactttaaattcggacatttatgaaatcaagtcttcttatttccctttgtttggtatttctttgttcttgtcaggaactcccgatagaagaatatgccgtgatcccccaaccggcggaaatcgcctacacttccgggtttgtcaaattgaagagccagcccgttgtcgcctatccttcggagctggcgaatgaagcgcaactccttcaatcctatctgtcttccgacttttcagtcggagccgtattgaatgaaggtggcgggaaggcggatataaccttacagttggacccgactgttttgccggataaaaaggaaggctatgttttggacgcaatatccgggaaggtcatgataaaagccaattcaccggccggtatcctgaatggtgttcagactttgaggcaggtgatcaaagaaaaagacggcaagttgatggtacagaaggcgatcgttacggactaccctgctttttcgtggcgtgcctttatgttagacgaaggtcgttatttcaaaggcaaagaagtggtgaagcagctgttggatgaaatggcagacctgaaaatgaatgtcttccactggcatctgaccaacgatcaaggatggcgtatcgaaataaagaagtatccgaagttgacggaaataggagctttcagggattcttccgaaatcaaccattttgggagtgacgtgtatgacggtaaacgtcatggcggtttttatacgcaggaagatttaaaagaaattgtggattatgcggcaaaacgccatataacgataataccggaggtgagtatgccaggacatgccagtgcagctatcgcatcttatccctggttagggacgagcggaaaacagataaaagtgccggggaaattcggtgtacattatgaagtttttaatgtggctgatcctgacgtgatgaaattcttggacgaggtcacagatgaggtaatcgcgatcttccccggttctgtgttccatatcggaggtgatgaagtgaaatatgatcaatggaaaaattccccagcgatacgtgcttacatgaccaaacataatttgaagactccggccgaacttcaggtctattttacaaatgaaatatccaatatgttggcagtcaagggcaagagaatgatggggtggaatgaaattaccggagataaactgcacgaatatcagtcagatgccgatacagaaggcgtgaaacaggagttggcttccggtacgatcgtccatttctggaagggagacacggctcttattaggaaaacaatagaaaagggatatgatgtcgtgaattcttatcatgaatatacctatttggattattcatacgagtcgattcctatggaaaaagcttactcgttcaatcctataccggagggcctgacggatgatcagaaaagtaaagtattgggattaggatgccaaatgtggggagagtttatcccgacagtcgagagcatgaatctgaaagtctatccccgcttggccgcttatgcggaaacagggtggacggatgcttccaacaaggactatcaacgttttttggacaaattgaattcctttctacaaaagtggaaaacggaaggaattacctgtggtccggttcaataggaaatcattgttaaataataaaataacatcgatctgggttaaacctttcgtccggctccaagtctattatccagaagcgcttcaaaaacaaataagtttaatattaataacaggtaattagtttatgaagaaggtaataggattgtgtttggttctcttgatcagttcgatttctgtttttgcccaagatggcaaacgaggtgcaaaaaaaggaggtgatccggcacaacgttgtgaaaaaatgattgctgatctgaaattggatgagaaacaggcggcagatttccgtaaagtggaagctgagttcagagataagatgaaagcggaaagaaaacaggccgatttggatcgtcggaagatgcgcgaaaagatgatgagcttgcgggatgatcgggatgcggagatgaaaaagatactgacggaggatcagtataaacaatatctcgaaaagcaacgcccccagtctcctcgtaaaagacatggtcgcaaggaatgaaaaaatgactcccgtctcatattgtttggaacgggagtcattttttatgggacaagaatttataatgtttttactttcaggtttctccagagaaccttgataccgcctccgtcatggatttgcagagcaatgcgtccctgtccggctccgatcttttcatcgttgatgttgaccatctcttgaccgttcaaccaagtttggacattgtctccctgtactttgatacgcatggtattccagtcaccctctttcaggatattttctttttcatccgggatttggatcaaccagccgcgtccgtatgattcatagatgccgccagtgtcatggcctttgggagctacttcaacctgccaaccgtttactttaacatcctcttcgataaaggaacggatgaatacgccggagtttccgtctgcttcctgtttgaattcaaccgtcaggtcgaagtcgtcatagtaatcgcgtgtagccagatagccgtatttcttgtccggaccgctttcacagatcagcaaaccatcttctacataccacttttccgtgccataggcttcccatccctttaggtctgtaccgttgaatagcgtcacttcttttgtcttgcgggggagttctttgatcttgatgttacggaaagaagcagggtatccgtggtcttgcaggcaaaggacacctttcttggccaagccgtattctggggcgtttgcccatttaccgctgttcttctttgcataccaatcgtcagtccaggctttgaattctaggattttgactccgttcaaccaatgttctacatgtccgttgtcgaatacgatctttgaattattccactctccttgcgggtttactttcatttttgccttgtcggggaggtgcatggcgtagtcgacacccaacttctgccattcttccagtggttcggggaagttaggttcgtctattaactgatattccggtcccgtgacgtatggaactgcgaattggggacgttcgactacatggtatagcataccgctgttgcctcctttggacaatttccagtcccaagacaattcgaagttctcatactgcttgtcggttacgatataaccactcgcgtcgctaccgtctccttttgcttggatgcatccatcaaccacatgccagggttgtgtcagggttgttccgttgtaatctttccagccgtttaatgttctgccgtcgaagaggagttgccagccgtctgcgatttcttcgggtgtaagaacattctgttttgtctcacaagaattcaaaaaaagcaaaaagctaataaaatagagaccgatcatcaatctatttaccaaattcatatgctaaatcaaatttaaagttttcttattcagatattattattccacaatcgatttaatcctaattgcacgaaatcgcacagttgaatcatgtcccaaaaaagcaatatgccctttagaacgtaacagacccggttgtattttttcaacaggtataccttgtgtaacttttttcaaattcgtatccaaaataacaaagccatttaaaataatctttatatgggcaccatcagctattacttcctgaacattccattctccaactggtttgagatatccacgcttagccggaacgtaattatacaatccaccgtgatactgatagggtttcaaatccttatattgagagtcttcattatctaaaatttgtaactccatgcccaaataacctttatctttaggcataacaacatgacgcaaacctaacccattatttgcacctggagtcaattgaaattcaaaacgtaaaataaaatttccaaattcttctttcgaataaagatttccaaatccagaagatttttttacgatacatccatcctccacaaaatattcttctgcattattaatccaattattcaacgattgcccatcaaagagcaattgaaaaccatctttttcttcttctcttgaaagttgatttacattcttttgttgcccccatgcacaaaaattagaacaaacactcaataatattacaataatgttcactatcttcataccacaataatttacttttttcttttaatttctttaaagttctccgcatcccaataaataacatcaccacgcacatagctttcataactcaacaatgcaggagcagcagaacgaacaccaaacagaacatccgcaaccagaggagtcttatttcgaataccgttgaaaaaattgtaaaaatgatcataatgcccacctctataattaggctctgctgcaaaaacatactcagtctttgttttttgaacaggggtatctataccttgtccaattttcttcaatgtattcaacgattggatatccattggacggaaagtttttaaaacgaccttatcccacgcgacatctaaagttccttctgatcccacaatacgaaaatccatacttccccatttttttgagacaccatctatataattagcacccaattgaacagtaaatgctcctataccgtttcggtctggataatcaaaatatccaagcattatgtcaggtgtatcacgacaaccatctatataatatcgtattcctcccgttgtataaattttttccggaccaatagcatccattataaaatgcaaacttgctaaaacatgtacaaacaaatcccctgcaatcccagttccataatctttccaatttctccaataaaaaaagcgttgagcatcaaaatcgtgtttaggagcattccctataaactgtttccaccaaattgttttttccgaagcatcttccggaatcggataataccccaaagttcctggacctcccgtaaattgtccatccacaaaattgacttttccaataatcccggcttgaaccaactggcgggctttcctatttcccaaagatgccataccctgacttcctgtttgaaaatacgaaccgctagcacgctgagcatcaaccaattctcttccctcttctattttatggataactggtttttcacaataaacatgttttcctgctttcatcgccgctatagctattggctgatgccaatgatctggagttccaataagaacaacatcaacgtccttgcggcgaagaatatcttgaaaatctttcgttacaaaaagatgatctccccattgttcttttgccaattttagacgagcatcatacaaatcacaaacagcaaccaatttcactccacctacagacaatgctgtattagtatcagcagttcccattcctccttttccaatcaatgcaatacgaatctctttcatatctgaaccatctgaaatagacgaaaacgaatgatccattcccttttcaactcctaataagaattgagggatagaaggcaataaaattcctcccgccaccaaactttttataaatcttctcctaactatcataattttattcaatcattattttcaaaagttacaacatataacaataaatctgcatccggatcaattttatgcatagaaactgacgcaatacgtattggaagaacatatttaccaaacaggttatctccaccatcagagatcaatccactctttttcaactttatttcaacatattgttcatcccattttgctggaattttccaaaaagactggttgaactcgtatgctgtctctggaagaagtttataatctgttttattctccttattataaacatccaatgcttttggatcaacttccaaagtatacgtcatatcccattggttgtaataatttgtttgcacttttgtataaaaaagaaactcatcatctgaacttggtacgaacgaagttcccggactcatcaatcctgaatttgaaaacttcaaataaggctcactcacatttggatataatataacagacattttttcctcatctgcaatagcgattgaattatcaataatctccatacgacagggcaagacatattgtttttccgcttctgcattccataaaaggatcgtttccggattaaaatctattttaaaagcctttcgatagtcttcctttccaaaagaaagttctgcatcttttaatacataacctcctttcggcatcattttataagaagtcccattcgtcttattataatcagataacacagtttcatcaacaacaagacgtactttcgcaccttgtcctcccttgcctccttttattacatacaaatcataagtatacgtaccccaattaaagatcgtcggagtgttcagcccagcctcattcaaataaattttatcttcaaccatatattcatttaaataatcttgattacaagaagacataacaagcaacatgaaccaaagcaaataactatatatatttttcataatacattcttttattaattaccaaccataattttgagtcatattcttcatctcattcagttgagcttgattaattgggaaaaaataatgtttcggctgaaaaacacgtggtgttgtccaaacctgatctgtacgttcccaagaaccttcataggttgtagacattacattcctacaccaatttgcccctgacatttccttttcagcaatcatccaacgtcttacatcataataacgatgtgcctcaaatgccaattcaaccatccgttccttctgaatcagcgtacgcaacaactcttgatttcctatcacttctggataagcctcttctagcttgttcaaaccagcacgagcacgaatcaagttgacatatttcaatgcttctgattcattacgattttttttctcattacaagcttctgcataattaagataaatttctgcaagacggtaataaggccaaaaaatccgtccccaattaccattttcaacatctaattgaggatctgtcatcctacgccataagtaaccaactttaacgcaatcacctgaccctaaataagaagaagttcctccattaaaaaaggtaaccagctttatccctttataagtattataaaaattaaacccatttgctaaaatcgaagcataaaagcgagcatctctccctacacagctattatgagccttgattgtagtatatccactagccttattttccaaaggatgttcaaaattctccgtaaaaccagaatctgaatatccagatttttcatcaataataggactaccatttgcgttatatcccaaaataggataacgaccagattctgccatcggataggtatcaactaattttatagatggcgcaaagcctccataaccttctttcacaactcttggaggtagactacgtacatttaactgaaatccatcggtctgccaacacccccatataacctcattattccattcttcaaagacaactccttgatacgacttgatagctttccggaatggatcagattccgttttatcttcatacaaagagaacatattcaaatctatgacatcttttgcaacctttgctgctctatcccactttgaaggatctggagattgcggaaacaaaaattctccatccttattttttaggccataataaagagagcatccgttaaacaacggacttgcagcatataacaacaaacgagatttagcagccatcacgataggtttagtaatacgtccttgccacatcggatcggttattgtcatgggcaaatcagccatcgctttatcaaattcattctctataaattccaaattcacatccaatggatgccgatccacatcttccgcgtgtagcattatatccggagtcttatctccccaaacaaaaacaggcccgtattgacaaacaagctcaaaataaaaataagctctgagaaaacgaacttccgctttcatacgcgtccgcacctcctctgtcaaatccaagcactggtcaacattatccataaaaaccgtagcctgattaattgcctcatattttcctttccaaatattgaaagctccagtagtcactccccaagttccatcattaaaaaccaaatgactaacacctgaataccaagaaaatagagcctcatcactacgaggcacagcactacctgcatctgacagccaatcatatgtattcggtaaataatcgtatatatgagctaaatacctttccgttgtttctcgtttactaaatgcctcttcctgtgtcatttggttatccaaaacaacatccaaataatcacatgaagttataaacccaacaaaaaaataaaatagccatattttatatatcgtctttttcatgatttatccatttaaaaattaagattcatacccaatgtcacatttctcatctgaggataagtatttccatagtttgtatccaattcgggatcccacagtttaaatccactaaatgtcaacaaattaacaccttgcacataaaaacgaagtgtagaaagtcccattttttttactaaattttttggcaaagaataaccgatctccgcatttttcaaacgcaaaaaactcatatcacgtaaccaaaatgtagaagaacgggagttatttgcattagaggtcattgacatacgaggatatttcgaatttggatcacgcgaaaattcactccatctattttctgccacatcctcaaaaatttgcccgtaatacaaaattgaaccactttgtccatacaaattgctaccacttataacacgagaaacgtgatccacaccttggaaaaagacagaaacatcaaagtttctccaacgagtactcactccaaatccgtaattaatttccggaatagtagtataccctatagcaacctcatcattatcatcaataattccatcgctattaatatccctatatttaatgtcacctacacgtgtttcaccaaaagtttgttgaggactattcgctaaatcctcctcagattcaaataatcccatagctatcaagcctctaagttgtccttgtgggaaaccagcattactacgataagtccacataggtgtcggagcatcgtcatacaaacgtttattacgattaaatataaaattacctcgtgcagaaatataccaatcttgatcaatttgagtctcatattccaaagacatatcaaatccttgattcttcatacgccccaaattaacatattgggtcacatttacaccaacaacagaaggaacactctgctgttggatataaataccctctctcttttcatagaaataatctacattcaatcttaattgattaaataaacccagttccaaacctacatctgccttttttgcggtttcccaagaaaccgcatcattaccgggatgcccggtagcaatacctgcaatccattgaatattatcacggccaaaattataacctccgatattcgtattcatttctgaattaaaggcgaaacgacgatttcctccgatcttgtcatttccaatttctccatacgaccctttaaacttcaaatgattgatcacgttcgaaattggttgccaaaaatcctcattactaatcatatatcccaatgcaccagaagggaaaaaaccaaaccgtttattgggtgcaaaattttcagaaccattatagccgaaattaaattctgcaaaatatttatccataaaagaataggtagctcttcctgcaataccaatattcttttgagggaaagatttgatataatcagaaccagggaaattatccttatactctcgcatagtaaacaaagctaaaccgctaacacggtgtttctccgcaaacaaattttcatatgtaaacgatgattccaaattcatcgaatggctacctctgttagaaacagccaatttcatatagtcattaccgtccctgtttttattgaagatcaaattaccattctcatcacgtcctgtagcgatataagtcgagggggacattcgtttatcttctgtcgactcattacgagcatcccaagaaaatttaacattgaactttaatccgggagtaacaatctccgaaaaatcctgcgtcaaactaatcaaagattgtgcattattataaaaatcttgtgaaaaacctgtataattcatatccaaataaggattggcaccaacatctggcctcgccaatgttccatctgaatagatcggtacaacagccgtaggcggtaccgaaagagcattattatacattgttgccatatctactcctaaacgccgtttgatttcatattggttagacatcgaaatacctaactccgtcgaacttgtaatatctatatccacattcgcacggaaattgaatttttgatattttacctgtgggtcaaaacgaagattatctgcaggattaaaaacacctccctcattgtaataagaaccaccaacataataacgtacccttttccctccacctgttacattgacatttgcacgaagattagtcgatgaatttttaaaaatcatatccatccaatccacaacaggatagaaatccggatcgtatcctgacaaatatttttcttgagtcataggctgataagtaagttgtccaccactcgacaaagttatatcattataatatcccatccactgagctgcatctgccaatttaggtatacgaattggctgagaaacaccatattccacacgggcattaacagttggaggtgcttcttttcccctttttgtagtaatcaaaacgattccgtttgccccacgaactccatacaatgctgtagctgttgcatctttcaatattgaaaacgatgcgatatcctctggatctaccaaatccatggatcgttcgataccatccaccaatactaagggggtcgtattggcaccaaaagaacttacccctctaatccaaaaatcagctccagcaccaggttccccagaacgctgaaccgcaacaattccagccaattgtccagcaagactagtgctgatctttgctacaggtactttaagttcttctgctgtaaccgttgaaatcgagccaatcacactagattttttttgcttcccaaaagcaacaaccgttacttcttccaactcgtctgcctgttgaagcatcttcactacaagttgtgtctgatttcctacttttatttcttgatcttgcattcctaaaaaagaaaatacaagaatttcactcggcaacacctctatatcaaaagaaccgtccaaatcagtcgtaaccccacgcgtactaccttttacaacaatagcagctcctggtagtggttctccattatcatccaagacttttccagtcaagttttttttctcttgagaaacaattaagctcttgttgtttttaactaatgtactattcctcctaataataatctgacgattttttattaagtattcgacatctgtccccctaaacaatttatccaaaatcggaattagcgtttcgttattaacatccagcttaaccttcctatccaaatttatattttcctcatgataaagaaaaacatattcactatttttctctatataagaaataacatttctcacactattgtgcatatgtatagttaatctcaccgtctctacataatcaaaaccagtctctgcccgtaatggtatcgtctcaaaaatcactaaacaaaatattaaacgcatgattttaattacaatgcatgtgctaaaatcgatttttttactttttttcatacatcgttttttttataacaacaattatagatttaacacaaagttccaaatcaagttctatcttactatagaaacttagcctctaatcaatacatctcatttcataggcatcctactttaaaattaaaatattgtttttatcatctatttcatatctcaaaaaaacagactggcaaaccatttctatcacatctttaacatcgtcttgcaaatctaatttaccagacactaataaattttcaatactcccatcatagataatattacatccataataacgggcaagtcgatcaaaaacctctcctactttattgttctttaaaagcattagattttgtacccaacaaatatatccgaaaatatctatatctttttcaatcgttttttccccattctctatttttaataattgattaggagaaagaatcatcttctcttcctgtatagtttctacttccacctgtcccttcaccaaagctactgctgcagaaagatctcctttataggcacatacattaaactgtgtacctaatacctttatctcaaaaaattcagttttaacgataaaaggccatgaagatgcttttttcacatctaagtaaacttctccatcaactaatatttcccttttatcttgactaaaaacagctggataaacaactgttgttccagcattcacatacattatcgtactatctgaaaaaataatattgactctttttcccttcggaacaacgactcgcaccaaatcatcctttcctacttttttctctattctatttcttttacatttatatgcaaattgttctatattagcctttccacttgtatcatattcaataaaaacatcatctttatttatactcacctcatcttcatcagtaatcaataaaatatctttacattctcgatattcattttcctttaataaattaaaagacaatattttttcacgttcttctaaaatacaataacctccaataaatacacaaagaagagcgatagaagctgctattgaatatatatacttcaattgtgaccagcataaataatatttatttatcgacttttcttcaatacttttttgtatcttcttgtacacctttaatacattccgttcttttattcgctcttgtgtacgtatcatatgataaatacgagccaactgtaacattatattctcatgcttcgaatcttttttcaaccaagactcaacctttcctctctcctcttcagaagcggtatttcggatgtatttcaataaaagagaaccatccggttcatatatatgtgtattttctgttctcattctatttataagacaaatagaagagataaataccctaaacagcatctctatattcttactttattttttcttctatttacaatagattatcttttctgcctcaaacgactcgactttcattaaaaaatctccatctcttttgtaaaaaatcctaagcaaattcaatacaaaaagttccgttatataactttttcttgtatttttgtctttcgatagattgaatacaatataatgtagaagcgtttagatattatcttaggatccgaaatctggaaaatttcaatatccaccaagtaataactaaatgcctacgtccttatagatgtgggatatttagacatatttaggggataaggcataccagagcctcgggttcctaataagtcaaaacatttctcacgctattttttattacaaagcttaaggaatatggatgaaaataacctaataatactattacaacaaggagaccggaatgcttacaagcagctgtttatcaagtattactcccccctttgcgaatatgcgtcacaatatatttctgatgatgattctgaagagcttgtgcaggagttaatgctttttctttgggagacacgggaaaatcttgtaattgagacgtctttgaaatcctatctgtttatctccaccaagcatcgttgcctcaatgcgatcaggaaaaaccagtaccacgaacgtatccataaccagatatatgagaaaataaaagaccagtttgaagacccggactactatttcgtgaatgaactgacagaaaacatacagaaagcgatcgagaacctacccgaaacctatcgggaaacatttgccatgagccgattcggggaaaagacgaatgtgcagattgccgagaaactcggaatatcggtaaaaaccgtcgaatacagaatatcgcaggcacttaagatacttcgttttaaattgaaagattatcttccgcttctgataaatatcttaggctaaaagcatattgacaaaatgttaccatcataacattagttacgactaataaccataagtaaatagaaatactatagcggataatatttttaacacttcatatggatgacaagagaaggaaaacaatactaatctgtaaggcacaacgcattcgttaataaatcaaaatcaaaccaaagcttattaaacttacggaaaacttccgtgtctatcttttcgtacttaatatcagataagataaaataaaagttatgaaatcgggaaggtatttttttattctgtttttaattctattgattatgcctgcatatgcgcaaaaaggtgtagacatcaccggaacggtgattgaggaagggaccaatgaaccgatcgaacaggctacagttcgtttgttaagtgtcaaagacagctccatgatcggaggtgtcgccacatcgcgcaacggaagtttcatgctcaagaacatcaagaacggcagttatctactgcacgtgtcgtttgtcgggttcgatccgctctatcaacccctgcgtgttacggggaaaaccaatccggtcaagttgggcaaactcgcgcttaccgacggggcaattcaattgggcgaagctgtcgtgatcgggaaagcaccggaagtaaccgtacgcaacgatacgatggagtacaatgccgattcctataaaaccacggaaggctccatgctggaagacctgctgaaaaaaatgcccggtgtggaagtggatagcgaaggaaagatcaccgtcaacgggaaagagatcaaaaaggtgctgattgacggaaaagagttcttctccgacgatcccaaggtggcctccaagaatctaccatcgaaaatgatcgacaaagtgcaagtgttggacaaactgagcgatatggccaaaatgactggatttgacgacggagaagaggaaactgtcatcaacctgactgtcaagcccggcatgaagcagggctggttcggaaacgcttttgccggttacggtagcgaagaccggtacgaagggaacttcatggtaaaccgcttcatcaacaacgatcagctgaccttgatgggaggtatcaacaacacgaataatatgggattttcagaccttgcctccagtatgttctctgggatgggcggaccgcgtggacgtcggggcggaggagccggcaacgggatcacaacatccggcaatatcggcctgaacttcagtaaagaatttaatccgaagttgacggtcgggggcaacctccgttattctcattccgacaacgacgcgatcagcaagagcaaccgacagaatatcctaccgggcgacagcacttctttctacaacgaaaacaacagcagcaacacgcgcagcgacaatgtagcagccgacctccgtatggaatggaaacctgactcgctcacccagatcatattccgtccgagtttcagttacagtaacagccatagccgtgaagggagcaccttcaacacgctgagcggaaaccgcgacacggtcaacatcggtgaatccgattatctctccgacggaagcggctacaaactcaatgcccgcctggagttcagccgcaaactgaacagtgaaggacgtgttttcagcggatctctatcaggaggactaagcgattcctataataagggactgaactattcgaacaccgaatatctaatgatggctgacgggatggacaacgaactggtggatcaacgcttccgctacgacaacaaagggttcaactaccgggcttacctgtcctgggtagaaccgatcggccacaacaacttcattcaagcaacctacagcatccggcaaaacaaacaggaatctctgaaaaactcttatacccgtgaagaaggaagcgaagattacaacttgttggacacggcttacagcaaaagctaccgcaacaacttcatcaaccagcaggtcagcctcgccttcaaagctatccgggaaaaatatgactatacggtcggtttgacggtagacccgtcccatagtacgagcgagaacttcgtgggcgatacggttctctccaaattgtcgcgcaacgtggtgaacctttcaccgatggttcgcttcaactacaaattcgacaaacgcacgaaccttcgcatcaactatcgcggacgtaccagccaacccagcatgacacagttgcagccggtggcagacatctccgacccgctgaatacgacgatgggtaacccggacctgaaaccgacttacacaaacgacctgttcatccgtttccagaaatttgtgccggacaagcaaacagccttgatggtaatgttgaatttcgactatgtgatcaacgatatcgtcaacaagtccgtctatgtcggcaataccggtaaaaagatgacgacctacgacaacgtaaacgggaactacaatgggaacattcgcgtcctgttcaacacgccgctcaaaaaccgcagattctcgatcaactccatgacaatggcctcatacgccaacaagaatggttttatcaacgacgaaaagaacacgaacaagaacctgactctggtggaacgcgccggtatcgatttccgttccgactatctggatctcggactgaacggtaacatccgttacaacggaacacaaaactcactccagggacagagcgaactgaacaccttcaactacggtgtgggtggaacgacaacgatctatcttccactcgatttcaaagtggaaagtgatatcaactggtcgacaaactccggctattcagacggtttcaaacagaacgaagtgttatggaacgcctctgcttccaaatcattcttgaaagggaaccaagcgacactccgtttcaaaatatacgatatactgaaacaacgcagcaacatatcccgcagcgtaaccgccagctatacacaggactccgaatacaacacactgggtagttacttcatggtgcacttcatctaccgctttagtatcttcaaagggggagccagcatgaacgatgtgtccggacctggcggaagagggccgagacatggcggtccgatggggccgcctccgggtggaagattctaatgatttatccgttacttttggcttgatccaaaagtaaccaaaagatcaaggctgaaccgtctgggctactcctgtccgcttaggcctttcatagaaagctacgctttctcttaggatggccgatactgcctgctacatagatgtcggtatcggccatccccaaagagccgtcaggctctatcttcggcctaagctggcgagcgttaagcgaagagaccggagtgagcgcccggagcgtctgctgtctgagcgaagcgagtttcagacgcgacagcgaacgaaggaaacggagtagcgaggcaggttcggccttgaacttttggttacttttctttcaagagaaaagtgacagatagaaccttttgatcagcgaaggctccaatatagccgggtaaatcaaaccgtaaagcgctccgtagaagtgggcgttatgattgacattatcccccgcctttcttgccatatactggcaataggccaggtagatcacaccaaagacaatcccaggaaccggcagtacggcaaaaaacaaaatcttgccccacgggtccaggaagatggaagtgaacaagacagccgatacagctcccgaagcgcctatcgaaacatagtaaggatcattacgccggcggatcagatcatacagtgaagcagcaaccatcccgccaaaatataatcccagatagccacctgtaccgagtcccaaataaccgaaagcactttccatatatgtcccgaatgaccagaaagtaaacatattcacaagtaagtgtgtcatgtcggcatgcacgaaaccatgcgtaatcaatcgataccattcccggttatgaacggtacaatacggtatgaaggccaacttccgaaacaactcatggttgccgaaacaaatataggacacgacaaccgtgaccccgataataacataagtaatcataatctattctatattaatgacgtcaaatgtagtaaagattgaacaatgtttcccctatatggtttacaaaaacaaagcttccgcatttgctatttccgttttagcttcctatctttacaaattacaacatattgacagatataaaaaacatccgaaatgctggcactcatacacatacaatggatagtgggtataatattcatcatattatactgcgtcaccattcttgggctagtgttggttatcatcacggagaaccggaatccgttgaaaacgattccctgggtgatcgtgttactgctcgcccccggtatcgggctcctgttctatttcttcttcgggcaggataaccggaagcaacggattatctcccgacgcacctataagcgtatcatgaaacggccacaggaagggaaactcccacaagatgcctgttccgttccggctccctaccagccattggtcacactgttgacaaacagcaaccaatcgtccctgctctacggaagcgacatcacgatctatacgaacgggacagacaagtttcacgaccttttgcaagagattgccaaagcaacccatcatattcacatccaatattacatcttctgcgacgacgaggtcggaaacaaggtcaaaaaactgctgatcgagaaagccaaagaaggagtagaagtccgtgtcctttacgacgatgtgggctgctggaacgtgaaagacaagttcttcaaggaaatgtcggatgccggcatcgaagtccatgctttcctgaaagtggcgtttccagtcttcaccagcaaagtaaactaccggaaccaccggaagatcgtggtcatagacggcaaagtcggttttatgggtggcatgaacattgcagaccgctacacgaaagggaccagctgggggacatggagagacacgcacttcaagatcatcggaaagggagtacacggcttacaggccgcattccttatcgattggtatgtggtcagcaagaaactcctgaacgaaaagatctattatccgccgcttccggtctattcggatgataacatcatgcagatctgtaccagcggccccgtcgggcaatggcgtacactcttgcaagcagccatcttcacggttgccaacgccaagaaatatgtatttatccagactccttacttccttccgaccgaaggattgaaccaagctttgcagatagcggctttaggaggcgtcgacgtgcggttgatgcttcccaagcgttcggacacgcgtacggcgaacatggcgactcactctttcattgatgaaatggtaaaggcgggcgtcaaggtctatttctataaaccgggattccttcactcgaaactgatggtggcagacgacgaactgacctgcatcggttccgccaatatggacttccgcagcttcgagcataatttcgagatcaacgcatttgtctaccagccctcgtttgcccaacagatgaggaaagtattcctgcacgacatgcatagttgcgaaagactggtgccgtcacgctggctgaaacgcccgctcaaacaacgtatagccgaatcgtttatgcgtctgttttctcctcttctttaataaagatggaaaagttcaccgaaccgtagacgcggtgctggtagaaatagggcaacccggagaaatcatttgtcttcggatgttccatcacgaagatgcctccgtcccgcagcagatcgcgtttgaagacaagttccggcacttcgggcaattctttcaaggcataagggggatcggcaaagatgaaatcaaaaccttgggccggagccgaatggagataacgaaagacatcgccgcgaatcagcgtcagcgaatccgttttcaactctttggcgactttggcgataaaggaggcatgtgcattattcttttcgacagccgtcacgctccggcattcgcgcgaaagcagttcgaaagaaatgcttcccgtccctgcaaacagatcgagcgcatccaccccctcaaaatcgatatggttggagatcacattgaagatattttccttcgcaaagtccgtcgtcggacgggcgctgaaggtagacgggacatcaaaacgtcgccgtccgtatattccacttataattcgcataatgatagagctataagatccaacggagcctgcaacacctccgaccccatcaaataggcttcggaagggatctccagcggatcgatatattgtaaataattccgcaacgtattcgttatatcatttcgcaagggcacatcgccgaaaagacgcaactggtctttctgttgatccattccgacctgtttccatacatataatatataatacaaaatatcgtccgtatgttcatactcgaacgagttcacaaaaagcaggtttccctgcgcatagcacgccacatccatcctccgccgatgcaacacgacatatagctggcggggcaagcgcgcacggctctgcttcttccacagcgaaagcaacggaccgacatgatggacaaaacgaggattgacaagcgaacgggaacagaactcatacacatcctcatccactccgaataccagttccgccggttcgtctttcagttcattgctcaggcaacgcccttcgggagaagagaatgtgaacgccagcagttccgccttctgcttttcctgaaaaacagcagccggcacaagcgtatactgggaagtgacacacaccacattgacctgcctgtagaaccaggtcaggaaatcattttcgaagaaacattctttcagagaagagatataaggtcttgtccggtcgaattcgacgtctctataaaagaaactctcgctcaccgaaggactgtatgcggaaaaagaaagtccacccgaccgaagccggatggacattatgtaattttccgaatgatcagctgttaacttatcagacaagtttatagccataggctgtattaatcttcccagttacctgcgttgttattgatttcttcgacagaacctacacgcagaccggcatatttacccatcttgctggctttatctttcaggttatacacttcttgcttgttcaagtcacccagatagtcatcatacagaacaccgcactggaatacttttaccgtataacccgaacctgaagtcaaagtagccgtatccatcgtaaactgtacgttcgcacccggcacgttacgcaaatcgtctacattataacctttgccgaacaatgtatcaacagctgttacccaaacagtatcacgtctgatcaagcctttcttaacggcttctttctcagtcatacccttttcgagctgttcgtcagtcaatacaccttccttgataaggaacggcaatttttcatcttttaaaaacttactcagttcatcaaaattggctgcatgcaccttgtggatgttcttgtactcaatctgtgctttacggatatcgatcaaacgagctttgatcaaattttcacgacgatccctctcatccttaaattcgatcggacccataatacttctgtaacacatgtacgcaagcagtactactgccacagccaataaaatctttaatgtaactttcatggtttatattgttttttgaatttatttcgttcggcaaatttaaaaaagaatatttaatacactacctttatcgcgaaaattattacaatcaaaatgataaatagttatttaagccgccaaattacacaaaattttccatatgatccgaccgaagaccaggttttggcattaaatctcctatccaatttcctgctttcggaagaatcggattcgcttttactgctgaagggatatgcaggaaccggtaaaacatctttggtcggagccttggtcaagacgatggcagagctaaaacaaaaaagcatcttgctcgcccctaccggacgggcggcaaaggtattttccgactatgccggacagaaagcatttacgatacacaagaagatatatcgccagaaagccttttccaacgaaccgacaggttttcatccggctgataacttgcataaagacacgctatttatcgtagacgaagcgtccatgatagccaatgaaggactggactcgtttgttttcggaaccggacgcctgctggacgacctggtccaatatgtctattccggagaaaactgccgcctgatcctgatgggcgatgtggcacagttacctcccgtcatgcaaaccgaaagcccggctctcaatccggaaacattgcggggatataatttaaaggtacaggaaatcaccctcacccaggttgtccgccaaagcgaaaactccgggatcttgttcaatgcgacccgccttcgggacgccttacgaaacgggacggtcgagattttccccaaactaaggctgaaaggcttcaccgatttcagaaaggtaaacggagacgaactcatcgaagaaatctcctcggcctacagtcgggacgggatcgaagagaccatgattatttcacgctccaacaagcgggctaccctatataataatggtatccgcaaccgcatcctataccgtgaagaagaactttcgtccggcgaccggctgatgattgccaagaataactacttctggactgccggcaataaggagatggacttcatagctaatggcgaaatcatacaggtgttacgtgtacgaaggacttacgagctctacggtttccgttttgccgacgtatcggtccgtttccaggactacgatctcgaaacggatgtcaaaattctcctcgacaccttacagacagcagctcccgcactgccgaaagatcttaatgacaagcttttctataccattctcgaagattacgacgatgtcccgacaaaggcaggaaagatgaaaaaaatgaaagcagatcctcattacaacgtcttgcaagtcaaatatgcctatgccgtcacctgccacaaggcacagggcggccaatggatgaacgtctttctggatatcggctatatcacggaagaaatgcttggagaagacttctaccgttggctttacaccgcctttacacgtgcgacccaccggctctatctggtgaatctgccggaggaattcgaagaatatgcctcgtcctgatttaggttggccatgcctctccggtttcgcatccatatatttaagtaaaagacaaagaagcaacaatatcaattaataaacaaatacacagctattaacagcaattactaccactcctttgcttttcgcccttagtcgaaaaggtttttgacctgtgtcgaaagggcttttgaccaagggcgaaaaggttttcgactaagggcaaaaggtctatgagcaggcggtatgacaacagtagcatggcgattgtcacttaaatagagcctttcggggacgacttgatctctgataatggagcatttcggagcggttgtcctaacttcacaataaaaggaataacaatatttcatacaataaatacgttacatatataagaaatacctatttttgttgcaatataaacgaaaacctgcttgtaagttttcatgaatggaaaaaggaatggcgaataaagaaaaaatagattacctgcttctggatatccgggagcttgaaacattggttgccggcatgcgggatgcagaagtgtatccggtgtcttttttcggccagactttcgacctcacccataagattctgaaggacctacatgctttggaaacggcccagatcgaaatgctgcgtaaacagatggaagagcatcaggctctgatccagtctattcccccatcggttgccactccggtacaaacagtacaggaagcttcgattacagccccggctccgattccggccgaaccggagccagtcatccaagagcaggaaatcagacaggagcttcctgcagaacaaggattaccggccggaccggagccaatccccgttgaagagccggagactccggcagtggaagcatccggcaaagtgatccccgcagagcgtcccggattattcctcaacgacctgttggaaaagaaaaatttttcggatttccgaaaggcattcagcctgaacgatcgtttccgtttccgccgcgagctgttcggaggtgatgaggcacggatgaacaaagtaatcaatgacctgaacgatcttcattcgtatgaagactcggtcacatatttgaataacgaattaaagtggaatatagaggatgaagcggtagcagactttatcaagctgcttgaaaaacgcttcctctaagcaatgtgacaatggacaattgacaatgtatttgtctttgtctttttaattgtcaatcgtcaattatcaattaaaaagtgctatggcaaaattaacagtagtacccactcccgtcggaaatctggaagatatgacgttccgggcaatccgcgtgctgaaagaggccgatctcattctggcggaagacacgcgtactacaggtatcctgctcaaacatttcgaaatacaaaacaggatgcagtcgcaccataagttcaacgagcataaaacggtcgaacaagtggcagcccgtatcaaggcgggcgagaatatagcattggtatcggatgccggtactcccgcgatatccgatccgggattcatgttagtgcgtgaatgtgtacgtcagggtgtagaagtggaatgcctgccgggagccacggctttcgtcccggcattagttgcttcggggctgcccaacgagaaattttgcttcgaaggctttcttccccagaagaagggaagacagacgcgcttgaaagagctctcgacggaatatcgcaccatcatcttctatgagtcacctttccggctggtcaagacattgacacaactagccgagtttttcgggaatgaccgccctgtttccgtatcacgtgaaatatcgaagatacacgaagaaaccgtacgcggcacgctcgaagaagttatcgctcacttcaccgtgaacgaaccgaaaggtgaaattgttatagtattagcaggcttaaaagataaaaaggacaaagagacaggaacagaagtttaacgtaacaacagaaagaacatgaagaaagtattaattgcaacaacgatttgcacagccatgctggcctcctgcggacagaattcagcagaatataagaagctgaaagcagaaaacgactctctgagaatcgaaaacaccaaaagcaatgccgagatggatgaaatcctcggaaccctcaatgacgtagaggctgacatccagtctattcgtgatgcagaaaattatctcaacatacagcaacaaaagggagatctgaataagagtaatcgcgaacagatcaaagaaaacatgcagttgatcagcgaaacactgaaaaagaacaaacagcagatcagcgaactggaagagaaactgaaaaagagcggaatccaatcctcggctttgaggaaaacaatcagccgcctttcttccgaacttgaccagaaagccaatatgattgtcacgctacaggaagatctggcaaagaagaatgttcgtatccaggaattggacgaaatggttgcttctttgaacgaagacgtggaagacttgtccactacaactgcggcccagtccgagaagttgcaggaacaggacaaacaacttcatactgcttattattgcttcggcacggcgaaagaactgaaagaccaaaaaatcctttccggtggcggcttgtttgccaaatccaaagtattgcagagcggcttcaataaagattatttcatttctatcgatatccgcgaagtgaaggaaatcccgctgttcgcaggcaaggcaaagctgaaatccaatcacccggaaggttcttacgaatttgtgaaggacgaggacggcaatatgacattgaagatcacggacgaaaaagcgttctggagccttggcaagtatttggtgattgaagtaggatgatgaaatacaaaagtctttttattgatttggacgataccctttgggacacgtaccataataataaggaatgcctcgaagaagtatataccgctcaccactttgaccggtattatgcctccttcgaggcttttttcgagatctactggccacacaacaacctgctatgggaacagtaccgcaacaatgaaatagaccgccagacattgatcatcgaacgttttcgctatatgctccgcccgttagggatagaagacacaaaatcggtactggcgatcaacaacgatttcctgcaacgaacaacccgcaagacacgcctagtaccgggtgcaatcgagctattggaatacctgcgtccctcctatcgcatgtatatcctgtccaatggtttccgggaagtccaattcaaaaagctctgcaattccggtctggctccctatttcaaaaggatgatcctatctgaagatgcctgcatccagaaacctcataaggagattttcgatttcgcccttaaaaacaccaactcccgccgaagcgaaagcctgatgatcggcgacagttgggaagccgacattatcggtgcccacaattccaaaatcgaccagctatggctgaatccgaaagggctgccggcaaaagaattcataccgacttacacggttggaagcctggaggagatcaaacggatcttatgacttacacctaaaagaaaaggaaccggaaaagccgtcttcctgccctttccgattccttccctctcttcaggatgcctcctgtcaaaaattataatggaaaccgatgctgatattttccgtgtcgaagttcacacctccaaaatcagaagttccgttgtacgaatcgctataaccaagaaatccgactttagtgacaaaagatatatgttccgtcgctttcaaagaaagtcccggacgcaatcccaaccggaaaccggtatcaccgtcaccggcagcaatcccaatcgtcccatcgacaaacaatcccacaatacccgtcttataaaacgtatagcgagcatacggagcaaactggaaacggttataatcatcgtaatgcgtataaccgatttcacccccccacggcccattggtcagtcaaatgacatcctacttccggtgagatctggaaaacaaactcactatcttcactaccgactgtaaaaccaccgccaatatacacctcctgtgcaccgaccgagcaaatcgccataaaggcaatcatgcatgaaacaaataacttcttcattttactttattatatataaatattattagaactctgaggtaaaatggaatttgatatcggggaaatcctgctgtgccatcatcaacacatagctggaatcggccagatagacatcgcggccctctttgtcgagcgccatatattgagctttacggcgtttgaagttttcaagagcggcagcattatcgctttctatccagcaagccttatagaggctgatcggttcccacttacactgtgcgccgtattcgtggagcaagcggtactggatcacttcgaactgcaattgtccgaccgtaccgataatcttacgtccgttgaactggttggtaaaaagctgggcgacgccttcatccatcaactgctcgatgcccttgttcaactgcttggccttcataggatcggcattctcgatatatttgaacatttcaggagagaaactcggcaatcctttgaaatgaagttcttcaccggaagtcagcgtatcaccgatcttgaagtttccggtatcaggcaaaccgatgatatcgccggcaaaagcctcgtccactacttccttcttctgcgccatgaaagccgtaggactgctgaaacgcatcatctttccgaaacggacatgcttgtagttggcattacgttcgaaacggccggaacaaatcttcacgaaagcaatacaactgcgatggttcgggtccatattggcatggatcttgaaaacgaaaccggagaaggcatcctcttccggatcgaccacccgttccacggccgacacgggacggggagaaggagcgatattgataaagcaatccagcagttctttcaccccgaagttattcaaggcagaaccaaagaacacgggagcgatatctcctttcaggtaggtatcgacatcgaattcgggataaaccccttctatcagctcgatatcggaacgcagcttttctgcctgtccggcctcgatatagttttcaagttccgggctgttgatatccttaaattccacgttttccgtcacatactgcttgctcggagtatagaggttcagtttctgttcatatatattatagaccccccggaaccgttgtcccatgtcgatcggccagctcagcggacgcacatggatatgcagttcttcttcgatctcgtccagcaagtcgaacgggtccttaccgtcgcggtccatcttattgacaaacacgatcacgggggtcttacgcatacggcagacttccatcagtttacgggtctgggcttccacaccttttgcggtatcgatcacgataataacgctatccacagccgtcagcgtacgaaacgtatcttcagcgaaatcctggtggccgggcgtatcgaggatattgattttatggccggaataatcgaaagccatcacggaggttgcgacggagattccacgctgcttttcaatttccatccagtcggaggtagctgtcttcttgatcttgttagactttacggctcctgccacatgaatggcacctccaaagagcaacaatttttcggtaagagtcgtcttaccggcatccgggtggctgataatagcaaacgttcttcttctctcaatctcttctgaatactgactcattgttatttatcttattttgttattcttttcatacattcacgcagactcgcttcccaatgggatatactgatcttatagatcgttttgatcttagccttgttcaggacactgaaatgcggacgggcagccttcgccggataatctttggactcgatcgggagaacacggcagggggcattccctaactccataatcttcacggcaaaatcataccaactgcaaaccccttcgttagaataatgatagataccgggaacgaaagcatccgcctccgcctgcaccaacactgcaaaaatggcagccgccagatccccggcatacgtcggcgaaccaatctggtcgaacacgacagacaactgttcccgttcatttcccagacgcaacatcgtcttgacaaaattattaccgaactcagagtacaaccatgccgtacggatgattactgcatccgggcacacctcctgcaaagcctgttcaccggcaagtttcgtacgcccgtagacagaggccggacaagtattgtccgtttccacataaggcaaatgatttgtgccgtcaaacacataatcggtagaaacatggatcaccctcgccccagccatacgtgccgcctcgcccaagtttcgtacggcatcccggttgatacgaaggcaaagagcttcgtcatcctccgccttatccacagccgtataggcggcacaattgatgatataatcgacttgcttctccttaacaaaagcattcacggcttgagcatcgcagatgtcaagcgtatccacatccgtaaacacaaacgcatattgcggatatccggcagctaaccgacggatcgaattgcccagttgcccgttagcccctgttactaaaatcgttttcatcttgtcttattcttctaatttcagttccccattcatatcttcacgatacttctcggccagaagtgccaggaacgaactgatctgtttgatcccctccatcgtttcagggctgatttccttcccttgcatcttcagcatcaggaaaccgtaaatagcattgaagcaagtctccaactcaggcaagtcctcgccgcccgatttggcacggagctgaacgataaaggggagtgttttataataggccgccccatacaccatttccttcggcgatttcaaaagacggaggtgcagatcggtcagggcaatgatcacattcttgttcagctggatatgtcccttttccatcaccccttcggaacgcatcatctcgattagttcctcataccatttggcgatttcttcctttatatcgtccggttggtcgtaacgatctacaaccgtgcggcggatcgaatccatatcgaagttattggcacgtatcaggtcttccacctgccacatgtacaacagatattcggctatattttcttttctttttcgtcttgcaataatcatggttgcaaagatacactatattcggataatgcctgataaaaatccgcatcttttacacctaactggcggcaggccaggcgggcagcattcaggttgatcaggaaaaagcgatccggaatatagacgggaaagtccccgtagcgagtctgcaaataggtctttccctctttctcgaccacgacatgctggtcgtaaggcatggctgtaatgtcttcgcgaacctcttgcgcaagctgtttgacaaccggatcgccgtcgaaatagatcagctttcccccgcgttcgatagaagaggcgaacgtacggaaagtcgtatggtaggcctccggtgtggcgtggtcggtagcggaagtccacatcagattggtcagaatagcgatatgcggacgatagaactccagctggaaccgtttctccaaagcagacgttacatgctcatcaccttcgataatcgcgatccgagcttcataactcagatgcacacggtcgggcaacaaggggacttcgctggtcaacgcatagtcgaacgccagtttctgccgcttcagggcgcacacaatcatcgagatgatcgtcttctttccccggctaccggcaacaacaacccgcgtcttctctttcgtccgctgaaagatgaattcaggtatcgaaagcactaataatcccagttcctttgcacgtatcaattcggggttatcctgccggactgcggcccctaataccacaaaatgtatatctttagttaatctctccgggaaccacccgtctccatgacaagtacacccctctttttccagtctggcaagggtcgtatcagtcagtccaacaccggatacacttacttcatatcctttttggtggatagccagggctaagtcaaacaacagaggctcggttacggagattaaatgaacttttcgcatcactcagattttgcctgcaaatgtacacaatttcattcacgcttcgcatgggtttgaaagaaaaaacttccctatctttgttggaaaaagtataatttatggatattcaacttatagacacaggctttttccatgcagacggaggtgccatgttcggtgcgattcccaaaactgcttggagccgccgttatccaagcgataaacaaaatggatgcatcttggctatgcgcagcatgttagtccgcgacgggaacgggaagatcgtactcgtcgacaacggggcgggtaacaaacacctgaaacaactcagctattacaacttcttcgacctggtcgatctgaaggatgaacttcaaaggcgggatgttgcctgtgaggatgttacagatgtcatactcacacatctccacttcgaccattgcggatatacgacacaaaaagaagagcagaccggtggaaagcatctcttcaaaatggccttcccaaacgccatccactgggtaagccgtgcacagtgggagaacttccttcacccgaacgcactcgaagccgactcctatttcatcgaaaacatgcaggccgtctacgacagcggcaagcttcgcctcatcgaaaatgacacgaatctctgccccggcatcgacctgcggctgttcgacggacatacgccggggcaaatcgcaccttatatcacgacacctgagcgcacttatgtcttcgccggcgatgtcatcccgttggcggcaagcgtctcgcccctctggatctcggcatacgacacctatcctgtcgtttcctacaacgaaaaaaggcggatgctggaagaagccgcctcagagaaacaggcggtcatctactgtcacgacgcctatactcagtgtactaccgtgaaaaaggtgaacgactttttcaaggcagatcaaaaatttcacttttttccatagggtgaaaataaagtctcccgcaggtaaaaataaagtttcatcgacagggaactaaagttacccttacatgaaactacaacaagattactaccggactaaagaaaaagccggttgtattgtagggcagtctgctatttatctttatctttgtctgattataatcataaattaatcctgatcatcatgaaaaagacaatcttcgcttcactgacaatcctgacattctcggccctgatgttctgttgcagcaatgctcccaagcaggagaaagtgcttcgccacgttgtcatgttcggtttcaagccagaagtatccgcccaacagatcaaggaagtcgaagatgctttctgtgcacttccctcccagatagacctgatcaaagggtacgaatggggaacggattgcagtcccgaagggttgcaacagggattgacgcactgcttcttcctgactttccattcggatgccgaccgagacgcctacctgatccatccggcgcataaggctttcgggaaagtattaggagacaaggcatctgccgtcaccgtcgtggactactggaccaaataagaattattatttttctcacttataacattttaaacgcatgaacaaactaacaaagtatgcatgtatcctgacaaccctggccggagccgtggcttgttcgggaggtaaaaaagcacaaggagactatgccattatcccgcttcctcaagaagtggtgacacaaggcagcgccccgttcctgttgaaaccgtctaccccgatctcttatcaggaaggtgatgcggaaatggaacagaccgcccgtttccttgcctcctatgtcaaagaggctacgggatatgaaccgaaagtgattaccgggaatgcggacaaaggcattcatctgtcaatcgcttccgacatccggaacccggaaggctaccgcctgctggtcagcgagaacggcatcgagatcgccggagcatccaacgccggtattttctatggcgtgcagaccttgcgtaagtctatccccgccgtggccgaaggaatgaacatcgaacttccggccgccagtatcaacgactatccgcgtttcccgtatcgtggtatgcacctcgatgtttcccggcacttcttcccggtagattcggtcaagaagttcattgatattcttgccttgcacaatatgaaccgcttccactggcacctgacagacgaccagggatggcgcatcgagatcaagaaatatccggaactgacccagatcggggcgcaacgcaaggaaaccgtcatcggccgtaactccggcaaatatgacggcaaaccgtatggcgaaggcatgttctatacgcaagacgaaatccgcgacgtgatcgcttacgcccaagaacgtttcatcacgatcatccccgaaatagaccttccgggacaccagttggcagctatcacgacttatccggacctgggttgtacgggcggaccgtatgaagtatggacccagtggggcgtatcggacgatgtgatctgtgccggcaatgaaaaggcaatgaccttcctcgaagacgtgctcggcgaggtgatcgatcttttcccgtccgaatatatccatgtaggcggtgacgaatgcccgaaagtgcgttggaagagttgtccgaagtgccaggcacgtatcaaggcggaaggcatcaaaggagacagcaagcatacggccgaagaatacctgcaaagctatgtcatttcacgcatggagaaattcgtcgaaagcaaagggcgccatattatcggctgggacgaaatcctggaaggcggactggccccgaacgctacggtgatgagctggcgcggcgtagacggaggtattgaagcagccaaacagaaacacaatgtaatcatgacacccaactcttacctgtatttcgactactaccagtctaccgacacggaacacgacccgcttgccatcggtggttacctgccgttggaacgcgtctattcgttcgaaccgactgccggaatcccggaagagtataagaaatatgtaacgggagtacaagcaaatctgtggacagaatatatcccgacattcagccaggtcgaatatatggtattgccgcgtatggatgcattggcagaagtgcaatggacaaacgccccgaaagatttcaaggcgttcctgccgcgcttggtccgcatgaccgaactttacgaccgcttgggttacaactacgccaaacatatcttcgacattcgcgcctcctttactaccgatggtgacaaaggtgaaatcgtcgtgacactcgaaaccgaaggttccgccgatatccattatacactcgacggcagcgaaccgacggcaaccagcccgaaatacgaagcccctctccgcatcaagcaaaatgcagaagtgaaagccgtggctgtccgcccgaccggaaacagccgcatcttctccgaaaagatcgacttcaacaaggcgacagccaagccggtcacattgaaggtggctcccagcagaggatatgacttcaacggcggcccggaactgaccgacggcctgagcggcaacgacaactacaagaccggacgctggctcggcttccaaggcaaggacttagatgctgttatcgacctgaaagaaccaaccgaattcagcaaagtttctttcaacacgaatgttgtgaaaggagactggatcatgggagcggcaggcgttaccgtaaaggtatcggacgacggacagaacttcaaggaggtagcttacaaggttatcccgtctttaggcaaagacgacaaagacggcctttatccgcaggaaatctccttcgacccggtaaaagcccgctatgtcgaagttatcatcaagagtgacaaactcccgacatggcacggaggtgcaggtaatccggcgttcttgtttgtggacgaaatcaatctgcaataagtaaatatttaggcacagattacacggatttcacggattctctttctcatctccgtgcaattcgtgaaatccgtgcctaaaaaatataaagaagttttgctattctaacatattcccccccatgaaaagagacatacttatcctttctgccctttgtacctgttgcaacctttttgccgaagagatcacagtcaagtatctcaggtatgcaggtccttatgaaataaaattgtgtgccgaatgtaacaagatcatctgcgccggggtcgtgtaagcaccttcacccagaaaaacatttttgtccttaactgcatatcttttcaagaaatatccggactttaatctcgattctaagtttgttcctgctataatttcggatgatatacggattatcatggactatgagtaatgaattaacgttaaatttggtatattcatctatttttcttaactttgcaagaaattcaggcagaaatccactactttttaagtacattaagttctattttatgcatgggataacttttcatcctctcttagaaattacacagagcctgctttaagaaaaaacattttataaaccattgcgaggtattgaataaatgccttactaaaacgtaactttatgagatataaagatagtttgcaattgccatttttttgggcgataaacatcattttacctataacagcagctgtatactgctataattttagattgtgcaagctacaggagaaaagagacgtgtgatgacgatggcagtttacggttctgataaggaataaagtcttcaagatattgaaacaaggggaaaataaaagtgagattctgaaggagaccggaagtacagtcgccatagacaacacaagcctctctgtccgggagggtaagatattcgtaatcacgggacttccagaaagcagcaaatcaagtgaacggacatagggatttgatagacaactggattccagacaaggaagaatattaccgataaacgtcacgatggaatggacgttcagactttccttgtgatgatgtcactatcgcgtacatggaataaaaaacaccacgactacagatacgctctgaagatttgtggaatgatgaaatcttataccattaccacatttggaatagcagaaaagatcaagaattatatcttattgttgatcttgcagacataattcgttcaaaatgacttttatcaataattaattgtccattttatgtaataggcgtagcattatgcttttataactttgcatcatcaaaaattaacgttataaaccaagtgattcggtcactaaaaacaatatcagtgccaaaatgaaaaaaagtatttttttcttcttcctgttattcagtttgcaagctttttcacaaagagttgcgataaagaacaatctcgtatatgatgcactgttgactcccaatctatcgctggagttttctttttgggaaaaatggaccttggatacccaagtgggcatgaattttttcttctataagaacgatcccactgcagatgaatacaagacaaagaaatggagccattggcttgtgcaacccgagatacgatattggatttgcgagagattcaacggctggtttctcggactgcacgcacatggaggccaaatgaatgtcggtgggataaacatcccttttattcttcagaacaagcataaagagatgaaggcgcaccgttatgaaggctatttctacggtggtggcatcagtgccggttatcattggattttatccgacagactcaatcttgaagccgctttggggataggatatgcacacgtgagatatgacaagttcaaatgtacggcttgcggacaaaggatggagaagggaggagccgattacctcggcccaacaagagtctctctctctattatttatatacttaaataaaacaggccttgggcaaaattagtataagatataaaaatatgaagtgaatgagatcaatgcattattacataaagctggcagtagtctgtgccagccttggtttgacggctatattcggacaggcccaagaaatcgctgagcgaaacctatcaccattacattggagatatgacgtgagggtcaagcggagcgcggatggaaaaagtctgcgtttttccctgcatgtggacgccatgacccggttggagtcacagaacgttcttgtcatctatccatcactggtttccgccagtggggatgacaggatcgatttcgcgcctgtcggtatcgcaggcaggatacgatataaggccattacgcggtcgaaggctctcggtgagaattccaggacatctcggttcgacaatgagctccatcctttttcggacatagaggagcagggggtttcctttcaggaatccgtctcgttcgaacgctggatggcggatgcccatgtgacggtgagagaggaactgctcggttgtgtgggttgtggcatacgtgagaatcaaggtaccgtggctgtcattgacctgcctgttttcaaggagaaggattatgcgtatgatttcctcgaaccggaaaaggtgacggtcaagtattataaagactcctttgacagcaaggtcacttttcccgtggcgagctacgagctgagcaaggctttcgctaataacggacaggagctcgcccggctggaagaattcatatcaagaagtctggaaataaaagggggcgagttgaaagaggtcctcattgagggcttcgcttctcccgagggtaaagcggaatataaccagtcactggcggaaagacgtaccctagcactctcgaattatatctccgggaaataccctagacttaaaaaggccgcgacttaccggacggtcggtgctggggaagattggaagggccttaaaaagctcgtaggcatttctcctctatccaataaagaggagttgctgtctatcatagaccgatatccgacggatacggaacgagagtccgccatacgtaacttggacaacggcaggacctacggtatacttctgaaagagttttatccgcaactccgccgtacgacttttcgtttcagtttcgatgtaagggtctatacccaggaggagttacctgaaatatttgccacgagaccggaatgtctgagctcacacgaaatgtaccaactctcggaaatctatctcatgcggggggaaaatcctctccctgtcttcctaaaggcgtacgaacagtttcctgaggatgtggtagtgacactaaactatgccaatgccttgctaaaatacgggaaaaaggcagacagtgccttacgggtgttgaacgacgtgaggaacgacagtcgggccctttttccgatggcgatcgcctatcatatcaagggagactggagaaaagcggaagaattattgaaggaggcctataaacagggggatgaccgtgccagagctttctatggcgaagacgcttatgaataaagttaagactttatataacaacagttaatttatttattcactaatttttttaagttatgaaagtaaacaaatttattttagcaggcgttgctgtcctaggtttaggcatgacggcctgtaataatgacgatgttccttcggtagggaatcctaccgaaggaaacacattcgtaggaatgtacatctctactatgaaagatgtcatgaccaaggcggtaaatgacaaccaaggagattacgcgggtagaaaagaggagagtacacttgagtctttacggcttatctctcctggtacgcctcgggactggacgctaggaagcgctgacgaggagaataaattctgggcaacggcaacgaccggcacttacacggtcgctccatggaaagccacctcaggctcccaaacaatggcgttgttgtttaacaggggaactcttgagcctggtatcgcaacagccacgaacgaggagtatggaagtgtggctaccgcggtggccgacatcgcggctctcgccacggataataagttcgtgatgacctcgaaggtcgagcagaaaaccatccaggacaatatctccgaggaaacagtcaagacaggcacgggagaggctcagaatgtattctcctttgacatggaacgtgtcgtgtcgcaaggcatggtcacaaaagggggaggcctaaatgcggaaacagctgatggaagaggatctgttgatcttgataacctcacgtatacggctatcaacggcgccgcaaagacgtatcttttcctcaaccatgcaggagatcgtacaatcacagtgggagacgggctttacaaagatttcacatccgctattgatgactatgttgattttcaaaatgcccaagatccgaacggtactgccaaggagcatttgattcgcctgggaaacctcttgccggaaaagactccaacagcggataagcttggcatgtacgcggccaaggcggttgcggcagatgctaccgaggctaaaaaggtggcaggtatttatttcttggagaattccgtaaaaaaggaggcactcacacctgacaataagaatttcggttactatcgcctaccgtatgccaaggtctatacgacttatactccaaaagaggtattgcattgggatcaagatcaaaagaagttaatcagtaaacccggggtaaagggcgagacgttctatcgaggagaaggtgatgggctgatctatgccagcaaggatgccgcaaagaaaagccagttgagcccggatcaaaaagcttacacctacgcaaaagggagatgcgcatatcgtgcgttatggaaccgtcaaacaaacgctgatggaaaaacgattgtgaacgctaatactcgtcgtaacaacacctatctgttgacaattacggctttccagggcctaggtatgccgtgggatccttccgatcctaaagatccgtatctgccgaagcctgatgataaggaagaaccgacgaatcctgaaaatccggatatcgagaaagaagagacctacatgcgtgtcgaggccaaggtactccagtggaacctcgtctcacgtgatgtcgttcttgaatgatatttagataagaggtaaactcagttaacaatttctcacataaccttctgagagggaagggggagttttcccccttccctctccaatagacaaataaatagacctcaaacagttaataatccaaatataagctatatcaaatgagaatcagaagcgtacatcctgtcacatttatcatgctgctggcctgttgtcttattggttgcgattcagccgtattcgatgacttgagtgattgtccgcaaggcgtcaatttccatttttacagccagaccccttgcggacaatttcccgattatccgtcagatatcaggcaggtccgagtatttgtctttgacgagaaagatgtgctggtgagcgaattctctgataagaaggcagttctttcggcagattattccttgtccgtcactttgcggcatacggggaaacttacgtttgtcgcatggggaggccgtaacctagaggcttatgatttttctggtttcaaagaaggcgtcacgaccaagcaggaaatgtgggttgcgctacggttgaaagacagaagggtctcttcagtcccaaaacctctgtacgtcgggctagcttccatatcgctggagaatcgggaggatatgggaagcatatatgagtgggtatccttcaatatgcgggaactgacataccgggtacattttaccatctggcccatccccgatccattccctatggacgaggaattcgtcataaggatagaagatgataacggtgtttatgactttaacgggcagatcgccctttgcgaacgttttgaatacgtggccgaagccacacgtgatacggaaagggtattaaaggctgactttacgctgatgaagctggaggaaggcaggaacacgctcatatccctagtcaacaaaacaactggggagatcctttataccgccaatctggtggatgatataatcatgttccgaagtgattcgggcgaaccaccgtatagcctggagtgtgagcatgattttcccataacattgaaacttaagtacgagaagagtacatggacgttggtacaagcgaccgttctggactggaatgttgtttcccgtcccgtagaactaggtgctgatatcatttaggacagatttaaaatccgtgtagtatctgaaaggagttgagattattataaaaaacgatatataatgaaatacggaactgtgataaggttgttaacagcgatctgcgtggtaattatacaattgaccggatgctcgccagatacggaagatatgaaaagatccctcgcggatattcctatccggatcgtggcggaaatgaacaagggcaccggtgcttcccggatgacgaaagcctctgtgcgttcagggggggaatggaaggagaactatatcggtgcggaggaatacgagaaaaccgtcaaacatgtcctactcttcgcttataagaacatcgggacctctccggagaaaatcattttctattatccccaaggcactgccaatccgctggcgggtataaccggtattgatcattttgagatgagagagatgggaggaataaccgtagaggactccgatatagccctggacctggagctgatgggtggtaattataattttatcttattggtcaattgcgaatccggactgaaaaagatccgggaagagcatatgattccggatccgagactgctgacggagaaaaccgagattttcacgtccgacgatctgcaaggagaaaaccggaagtatcttcccatggtgggccaatgtaattttcacgttccgaacaatatgggcggcaatgacagggtaaccctttcacctagcatactcctggaacgcacgcatgcccgtgtcgagtttatccttacgacggttgatgacgcaggaaactacctgtctcccgtgttaccgctttccagagtgacgaaactctccttgaataatgagaccagcggttattccgtcctgccttccgccggggaatataccgccaccggtggcggtaacccggatatcaggggggtggactacacgggagatcccctgttgttaccgggaaggcccagttttcacgaaggtgccaacgagggctccggagaatccgcctttgtggccaaatgtaaaggaaggctgctcccatatacgggagagacacctcgctatatctacgtggccccgggagtctacgggaaagaggaagcgctggccttggtactatccatcgattaccggacgggagaccccgatgagacgtacaagatcgagctccataacccggatcttgggcaagatgacaaggcatattacaatatccgtcgcaataccatctaccgtgtcttctccatgctgaaagggaccaagaacatggagtacgacgttgtcatggatgaatgggaggatacggaggtggccatcccctggtaacaaagacgccactcatgtcatcaaaaagagaaacagtttaaagaacagatacatatgagaatcaaacattacactttgctattcgctttcttggcgatatttatgggaatacctctcatacaagggtgcagtgacccttttgatgagcatggaaacagagggacggaagtaccggccaaggatggctggcgatctgtcaccatgtccgttgaggggcttggccttcgaaatcccttgacccgctcccttacgccggagggagagaacgagacgacggcggagaggatcagggtacttgtgtttgacaaagacaataagttctcatacgaggccaaagtgacatctttcattccttccggtgacccggatgataagaaaagcaagggtaccatgaccctgctggcgaaaaatactccttcgggcaataccagcactttcgtgatgctggccaatatcaccgcgtcagacgaggccggggcggaagagtggaccggaaaaacacgggaagagattatggaacttttcacattctccatgcccgacaagggggaatggaaggacggagagctcccgatgtggggagtctcggatccggtcaaggtggatcacagttccggcgccgtttcaaaactcggaaccatctacctaatccgtgccgtggcacgtgtggatgtagggcttaaactgagtgacacgtcggaaggggcttccacgtttgacgagaaagccgagggcattgaggggataacactgactaaggtatttttttataataccaatacaaaaggacggatctctccgttcgagagcgagacttattgggatcaggccaatagaaaggcgaaacagccttccattcctgatcccgctccggccgtgacaggaaggaccgacaggacatccgccatagtggatgagaaaatattattgcgtgaagtctatgtcccggaggcggtcaacacaccgacaggtgccacgcaaggagccaacggagaggcgctcccggaagaagatacggaaaattacttgagacgcccctatatcgttgtcggactgaccggcgcggacaagagtcgtcccgacaaggagacattcttccggatagactatttgaaacgtacgggaaccgaggccgacgctacatacgagtaccagcccttactgcgaaaccaccgttacttggtgaacatcacggcggtgggtggcccgggattcgacacggaagaggacgcaaagaaagggccggccgccaatatcatgtacaatgtcgtggtatggaacgagtccacaatgtccaacgtacagtataacgggcaatatatgctgggggtcagcgatgatcatttcactttttatagggagggaggtagcctgacagcgaaagtgcagacttcctggcccgaggggttcacggtagaggggctgcccgcatggatcagctattccataaagccctcggaaccaggaaagtcagcaccgaccgacgagaaaatcgtgacctttacggtcacggagcaggtggacacggaccgcacatggccggaaaaaacagaagatgcccaaaatgcgctgaaagccgcttttatgaaagcgggccgtatgaaatggttccttggctttgagcagtccaaggatatcaatgtcaacctacggatcttcgcggacgaggcgtgcagccagccgctggaatttatcgaggtcaaccagtacggcgagagctatgggcagcctggtaaggtggtaacgaaagacggacaaacgcttacggcggaagaggccggtgccaaggtcactttctatgtgaagacagagcctcataacctggaacccgttttccatgccgaagccgccaacccgttcaaaatagagaaagcggatcaacttgcgggcgggatatggagatacacggtgacagctcccgatatcacggaaaatctggagtatttcgataattttaatactacttatatcttcaccgttacacatgcgggaaccgatagaagcgcatcgggaaaactcagtctcttacagaaagaatataatgccatccccttcttcgacaaatggctgcatcagtcattgctggtgtccagcaacagtatctatctgatgaacggcaaacagaagcaatattatgtcaaggccaacagcgaatacaagatcgaactggtttccgctttgtctgataacggagcgggtgatgtgatagagacgttcgctcctttctatgagaaggatccttctctttccggaaaaccagtttctttcacggctgttgacgatatcacaacctcacgtctttactctggtaaggcgagattcaaaatttattcccctgacggtcttttccctgagagagagttcgaggtggaactggtttccggaatagtgcagcctgaagcgaatacttatatgctcaaagcaggtgcaaagcaagggatatttatccccgtttcccgcgtaaataccgcctatgagtattataacatgcttctggaacatgacgctgttttgagtggtaagcaagggcttcccggaaacagatcagacttcatgctaaataaactggatgaagatgatgactggaaagtcaatatcgtgtggacggacattcaaaagcccgacgggcagaatgacatagagcgagcaggactcagtgaattatccgaacaaggaggttccggtccgggatcatatatctatctcaaacctggacagaccccgggaaatgtgttgatagagatcaagtcaggaaagatcaaggggaatccgacactttggtcctggcacatctggatagttgacaagtatccaacagtattggaggtcggtaaatatggaggagacggaccggagacggttcaattgatgtcgcatctgttgggggcttacgagaaggttcattcacagtatagcgctgacgagtttagggaatttggtatgcaataccaatggggcaggaaagacccgttcccggcatatgatgttcgtgtcaatacgaacttctatgacggcaacggcaagtcttttgatttcctttgggaacaaaggggaaatgatgtggattatggaaaaacagatgctcagcaagcaagaggggccgttcttacaatgaagcagagcattgaacatccaagcgccatcgtctcccatcaaagtttctggctgtatgaatgtttcccgcatgggatggttaataatttcaaagatcgctgggtgttcctgtatccatggaaccagccttccctgacaggaaatccggaagatgtgggcggaaaaaccgtatttgacccttccccttacggattccggatcatgtcacaaaaagaggccgtgactttgagatacgcatattattacgagagcaaatccggaatacagacacctctgcccggaagtatttatgacggctccttcttaagcggctatacagggggaaacgaggtcattttcgccgtggcacaggccaggagcgatactcatgcgggccgttatctactcaattccactggaggtcctgccggttgggcggctgcttccaatacaagtgctacttacaggcgttgtatgaccttctccgtacgtccggttatcgatccggatataacagatgattataaacaatatttacctgaataaaaaatacccgtgcaggtaatgcctgtacgggtatataaacaatttgaaagaagaaagtgaaactattatatttgagagaacatttatgttgttcgaattatcagatgaattcagataccggattctcttgccaccaactagacaaggatgatgtataccagattgacaacagcaagtcatcctgtgcgctctttgtgattcaaggccgggtgaatttcgatttagggaaatcttatgagggggaaatggagcagagacagatgttatacatacctcagaatatgaaagcccagatagaatccataacaagttcaagatgtattcttttgttttgggataagcacttgaatgtatgtaataagttgtttttaaactctttgctttctaaagagaatgatacagatataaaaaatattattcttccgatcaaaagtccattaatgaatatattagagtccattaacttgtatctggatgcaagattactttgtaggcatatgcattcactgaaacagcaggaactgctcctagtcttgagaggtttttacacaaagcaagaactggcagcttttttttccgcatcaaccaatatcggggaatcatttgaaagatttgtcttggataattacaaaagaacaaattcagtcaaggaacttgctaacttatgccatatatcagaacgatctttcaaccggaagtttcattcttgttttggggaaagcccttataaatggatccagaagaaaaaagcggaacaaatacaggagatgattaatgatccggaattttcttttaaggaaatagccgaagaactgggcttcagttcttcgccacatctaacaacatattgtcaaaggatgtttgggatgacccccagccaattaagagaaaaaaataaagataaatggattaaataaattgttttttatggaaaaatcggaagagcttcaaatagcaacttcaggaaagaatatggatatacaccgtatggagctattgcctgtggtatgcttatcggtttacaaagagattataaaagagatggcagaattgattgaggacaaacagatacgggaaatattttgttcactatctttaggaaaagatcttctatgtgtttcacagataacaggcatttcgtccaagaatctggtttccatgtataaaagggggatccgacagatccatttgaagtggaaaccttattcagaattaaaacgagaactagatcacatatatatcaaatgccgaaataatgaattgcttttgacacattctgaagaggtttcaaaaaagaatttcaggtatgtaaagattgttttgaaagagcaggatattccaacggaatatgtggatctattaagtacccctttaagtaaactggatataaactccaggactttacgtgcattcagaaaatataatatctaccaattggaagatcttttaaggttcattaaatataacggatttgaagctttataccaaatgcctggcataggcactaaatctattgaacaattatatgaaaagctgaaggataagaaaattttagtagatcaagacacttgttttttattcccttatctttttgtatagatatgtcacactgatatacaatacatacattttgtaggtagacaatgcacagtctttcgtagtatcggataagtcggcatcggaaacaaaaaacttgtgaaatagttactattatctctaatcttctcttcagcccttccaagcaccgttacaactacttaccagctattggtgtaatcaactctggttatgactcgaaaagggatactcacagaagaaggtattaggcatagagaacggaaacatatcctcccctcattcatagcaaatactaaatattaaccgattaaacctctcatacggtcttcaaaagcagacagagctgctttcgctccttctcccattgctatgattatctgtttatagggtacggtcgagacgtcgcccgccgcatagatgccgggaacattcgtccgacaatgcgcatcgattacaatctcacccggtttgttcgtttcgacaacgtcgcggaaaacgccactattggctgccaagccgatttggacaaagattccgtccaggtcgatcacccgctccgcatccgtcttacgatcttttacacgaagacctgtcaccttatcgccattaccgagcacttccaaagattgggaatgcaagaaaacttccacattcggcaagctctttgctttttcctgcaacacttggtcggctttcagttcgtccataaattccagaaccgtcactttcgaacaaatgcctgccaaatctatagccgcttcgatacccgaatttccaccgccgacaaccgctacgtgcttacctttatagaacggaccatcgcagtgagggcaaaaagcgacaccttttccgatatagtccgcttcgcccggaacattcaacttgcgccagcttgcacctgtcgccacgataagggcaggagcagaaaaacgttcaccggtagaagtggtcagaagtttcgccgatccatccagttcgactttatccacacggcgatgctccagtatatcgaccggatagtcgttgatgtgcatcagaaggtcgttcgccaactgctttccagtagtctgaggaacggaaatcaggttctcgataccgaccgtttctttgacctgtcctccgatacgttcggctatcacagcaacattcaagcctttacgtgccgagtagatggcagaagcagcaccggcaggtccacctcccactattaacacatcatagttcttaacaggtttttcaacagagttatcaacacccccttcattaattccgtattgggcttcgagcttggaaagcaattctcccaaatcactacgccccacattgatcagcctgccatctgcaaaaacagaagggactccctgtactttcatggcctcaacttctttttggttgatagcaccatccaccgtttcgtgagtgatacagctgttgagagtagccatgacattgagtgcctgcaccacatccggacaattggtgcaagtaagagacacataagtcgtcagcttgatcgggccgttcaaagctctgacacgggcacagataccttcgtccggtatatttttaccttttccatcgcaattcaggaccgctaacagcaaagaagtaaactcatgtccgttaggtactgcacgaaaccggataccggtaggcataccgtcttttacaattgtaaactgaagtccttcgccatccgcaacgctgcatgacaaatgatccgagcatgatgccacatcaccaagcaggtctattagctcctgacggctttcgtgatcgggagcgacttgtatatcaaatacatattgggataccagtccggagaaaatacccgaaagttggtctttcattgctgagtctaacataactttagatcttaccaaccaagtcgatactcggcttcaaggttgcttcgccttttttccactttgcaggacaaacttcgttcgggtgagaagcaacgaactgggcagcttcgactttacgaagcaattcgtctgcattacggccgataccgttatcgtggatttcggcaatcttgatctttccctcgggatttaccaggaacgtaccgcgataagccatcccctcttcttcaatcatcacaccgaacgcacggcttaaagcccctgtcgggtctgccagcatcggatatttgatcttacggatcgtttcggaagcatcatgccatgctttgtgtacaaagtgcgagtctgtacttacggaatatacttcgacacccatttcctgaaatttgccgtacttgtcagccatatcgaccaattcggtcggacatacgaacgtaaagtcggcaggatagaagaaaaagatagcccatttgcccttgatatcttcgctacttactgtcttgaaactaccattctgaaaagcctgtactttgaattcgggtacttgtgaattgataattggttccatgatttttactatttaatttgttactactattttttgtttaccctacaaaggtaaatcgtaagatactgattgaaagaatttttcaaattgataatttttatctgccgatagacggatttctatctgcaagcatacttatctactatgacaataggaagcaaagtaatgttttccggaacaataaaaatatacctaattgtaggtaaaatacctttcgatcataccatgtgattctttaattgttaactttggatgttaacttaaaaatattcgaagatgagaagagctagtttgtataatacattttcagcaagtctattgctcgtttgcaacgcatgtctttcttcatgtgtctcacaaataccccttacaaaggaaaaaccggtaaacaattccacttatcaagtcgaatatctgttcgaacacgaagggtgtaaggtctatcgtttcatggatatgggacattacatctatttcaccaactgcaagggagatgttaccagtattgaaagcgacagcgtccgcacagtcaaccggatcagccgtaaaccgatcatcatcaaagagcagacactcgattaggtttatacggttaccccgtgtttcataaagatcgctttcgcattggccagacgttctgctgaaagcggttccacacctttcagcttatagtccaggccttgcgcctcatatttgtaagctcccattgtatgataaggcagaagttcggctttctggaccacgttatatgaactgatatattcggccagcttgctcaaggcttcatcatcgtccgtcaggccgggcacgatcacgtggcgaatccatacagggatgccgcgtttctccagttcatcaagaaagcgtaaagtattatcgagttttacggccgtcaaacggggatgaagaccggcgtcgatcgtcttgatatctaacagaaccagatcgacctgttcgagcacctccaatgctttaccggaacagatatagccggaagtgtccaacgccgtatgaataccgttctcacggcaaaggcggaaaaactctttaaggaattcaggttgtaacaaaggctcgccaccggtcacggtaacaccacctttagcgataaaattcttatagcgcagcacttcggcaagcaacgcttcaggttccagcagataaggcgtttcacgctttacctcccaggtatccggattgtggcaatacagacaacgaagcggacatccctgcataaaaacgacaaagcgaattccgggaccgtcaacggtcccgaaactctctaaagaatgtatacgccccaacatattaatcaatggacaattataaactgctgttgatggtgcgcgagatgacgtcaagctgctgttcgcgtgtcagcttcacgaagttgacggcatagccagaaacgcggatcgtaagctgcgggtatttctccggatgctccattgcatctaacaacaagtccctatcgaacacgttcacattcagatgctggccaccgtcaggcgtaaaatagccatccaacaggctcaccaaattatttatctgaatatcgcgctccttacccaacgtagccggtgaaacggcaaatgtataggaaataccgtcatgcgcatgctgaaaaggcagtttggctacagaagccaaagcggcgacagcccctttcgtatcgcgtccgttcatcgggttagctcccggagcgaacggcgtaccacccggacggccgtcgggagtcgttccggttttctttccgtagaccacgtttgatgtgatcgtcaggatagattgtgtcggagttgccttgcggtatgtctgatgctggcgcagatattccataaacttctcagtaatgtcgacagcaatactgtccgtgcggtcgtcattgtttccgaaaggtacatattcgccttcgcgttcgaagtcgacagccaaaccacgttcgtcacggatcactttcactttcgtatcacggatggcagccagcgagtcggcaacgatagaaaggccggcgataccggttgcgcggatacgttccacatctccgtcatgaagccccatctcgaatgcttcatacgcatatttgtcgtgcatgtagtgaatgatcttcagtgcattgacatagacttttgccaaccagcgcatcatctgctcgtatttctccatcacttcgttgtaatccagatactcgctggtgatcggttcgaaacggggagccacctgcacacccgatttctcgtcacgtccgccattgatcgcatacaacaagcacttggccaggttggcacgagctccgaaatactgcatctgcttaccgatcttcatcggagacacacagcaggcgataccgtaatcgtcgccatagtccggacgcatcagatcgtcgttctcgtactggatggcagaggtatcgatcgatacttttgcgcagaagtttttccagttatccggagcattgttgaaccaaagcaccgtcagattgggttcgggtgccgggccgaggttatacaaggtatgcagataacggtaagatgtctttgtcaccagcgaacggccgtcaacaccttgtccgcccagcgattcagtcacccaaacagggtcgccggagaacaggtcgttgtattccggagtacgcaggaaacggacaatacgcagtttgataataaactggtcgatcaattcctgtgcctcttcttccgtcagcttgccttcgcaaatatctttttcgatatagatatcgaggaaagtagaagtacgtccgagagacatggctgctccatcctgatcctttacggctgccaggtaagccagatacaagaactgcacggcttcgcgggcatcctttgccggacgtgtcacatcgaaaccataaccggcacacattttctcaaatgctttcagcgctttgatctgctccgttatctcctcacggctctgaatgatttcttctgtcagttcctgtatatcgagacgtttctggaaacgtttcttttcttcgatcaggatctgggttccgtacagaggtacacgacggtaatcaccgatgatacgtccgcgtccgtaggcatcaggcaacccggtaatgatggcggaacgacgtgccgcaatcatctcgtctgtataggctgaaaaaacgccttcgttgtgcgtctttctgtatttggtgaagatttcttttgtcatcgggtccagatgatagccataggcttccagactgttttcgaccatgcggataccgcctttcgggaagataccgcgcttcaacggggcgtctgtctgcaagccgacgattacttcgttttccttatcgatgtaaccgggtccgtatgtgtcaatcccctggggaagcttcgtttcggcatcatatacccctttctccctttcaaccttaaatatctcggttagtttgttccacactttcttcgttttctccgaagagggtacgaggaacgtatcgtctccgttataaggtttgtaattgttctggataaagtctcttacattgatctcctttttccaggtttctcctttgaactgcgcccagttctcgttttcaaacttcataagcttatcttgtctatttcggtttaggcgtgcaaagatacgtcttttccccctatctgaaaaggatcgtaaaggacgaggaatgttaaactggggaaaatacctacaaatagggataagggaaataaaaacgaagccccggcagtacgaataccaccgaggcctgttttttgtctgccgtccggtcttcacagagggaaaagcagtagaacttttaatttcattactttagtattattaatattaaatccaaccgctcgttcgcctgtcgcagggtaattgaaaccgtagatcaagaaaacctcttacatacggtttcacgcaggttgtctagaattatttgattataaaatgtcattgtgcctgtgtaagggtggttcgctaaccacccttacgatagacagtattgttttttagtatcaatcgttacttaacgatagcttttacagcagcttcaccttcaacagctacaactactacacctgccggagcagcgattacagcgttgtcagaagaaacaacagtgttagctactacctgacctaagatgttactgataacaactttcttaccggcagcgcctgcgattgttacgttaccttcgccagcgatcactttcacttcagatgttgcgatgccttcgttggctgtcggagcagactgtttttcgatgacgaagcgataagcttcagacttgtcagccttcatgtagaagtagttgttgtactggcatacatactggccatctttacggatcacatattcgtcactaccttcttcggcacgtacgatctggaactggaagttcttcagaccacccttgatcttcttcggagcattatctttttctgcaaccaaaacagacttgccgtcaacgatagtacgcaaagtatcggaagaaaccaattcacctgctttgaagatcaatttggcatcacctgtcgctttattttccaagttaaagcgatagttcttgcgagcagcgtagtagcttgcagagtctacggcattgtacaagaagtttccacccttcgtgatatagaatgacgggatgttcaagttcgaatgaaccgtgtcaacccagaatgtcaagtcttcgcttgcttcattggcaatagccaggcgagcatctttgttttcatccattgtcatgaaacctccacgaacagcttcgaaagatatatgctgcggaacagcttccaaacttactaacggagattcttctaccatgtaagtcttcagaccttcgctaagcagagttgtcaagtcgtaagccgaagcagtagcccaaggagcagtcttgccatctttcaatttatcggcaaccttcaagctattaccttcgagtttattagtagtgttataatcaatcaagctaacagaaccatcaatattttctttgataacgaaattcaaaccagttgcacctaaatcgaagttgttagaaccccatttcaaatacatattgtcttgatcagcatcaaaggctttaaccttatatgtatagaaagcaaccgtgtccttttctgtagaagtgataggacggccgttcttcacatacatatatgtattcagagcagtcaagaacttctcgctcttttccaattcgaactgagcagcgtccaaagcatcactataagagaatatttcaccggtcatcaaacctttagcatttctcttggcacccacatagaattcaggagcagcttcatcgttcttagccaaggcgaatgtcaccagacctgcaccttcttcacggtttacgaaagaagcaaacttgtcttctacagttaccggattcaacgcaatcttggttgtagcccatttaacaccattaccgaatgtaacgtctccgtttacatcattaccatcaatatattcaggataaacatcccagttattgctattatcagtcgtatatacaatgtaagcatcaccttctttgaacaaagacaattcaatttcaacaccagactgacggtttgcaaacgttacctttttgtattttttggtatccgtgttgtaatcgctaatctttttaacaacaaactggaagcgcggatcctgttcattgatttcttctaccgaagcgagacggagaccactctgggttgcatgttggtcaactgtcaaccactggccatactcgcttaccccttctttgtcttcaccgctgacgaactggattgtgtagatagccggagcatccgtatcgttcaacagacccttaacatcataaagtgtttcgtttgtagccttgaatgtaagggcatgatcttcatcattcgtgatcatgtaatctacatcctggtcttttacaaaaccgatgaactgtttaccggcagcaatatggtcatccttaccttcttctttcaaaacgcgagcgttgttagtataaatctgataagttgtttcgtccaacaaagtcgggttgatcactgtgaaacaagcgttacccacatagatttcatccttcttagaaacttctcctgccacattgttaaaatggaagtcagagccctttacctttgtaaaccagaaccctttacctttaccacgcggtacttcgttgatgttcaggtttttcaacggatcaacagctacgaatgtagcagcttcgaattcttctttcttgtccaattgggcatctttgcctttcaatgtagccggcatgttttcgtctacaacaacaaagtatgtaccggcagggacattagcaatagttcctgttacaacttcgaacgccttcaaattcagatattcatcaccgtttttgaagatgttgccttcaaacttgtcaccggcagatgtcagattgaagccttcgccacccattgtgtcgttcatcttggcgatgtcggcattctgttctgcagtgtatttgcaaaggataagaacggtaccagtttcatctaccttaaccacattgtttgtctgggccaatgctaacgcatttgcaaccgtcacccctttcagatacaagattccgtttccatcgtttttgaactcaacatttgcagctgtcgtaccgcctacagcggcaaagatagagctgtattctgttccaacctcagctttgccagcttttgacgcattggtagtcaaatttccgttaagatcgaaagtcagatacttgccagtcgttttgttttgtaaggtataagtgtacgactttgtaccagcagcatttgtttcttcctttacagtgaatttccaaacagcatctgccaacttcgcagcagaaagcgcttctgctttagtagtcaatacgctaccatttaaagtagctgtcaaagccaagtcatcattacttatcccatcattcgtcaagtcacgaaggataatgtactcgcctgaagtcactttgtcattttcaaacgttaccggctccaaattattgggcaaaatttgcgcagaagcgaacgcacttgtcagcaggaaccctgccattagagtagaaaacttcttgttcataatctaaaatgtttaattaataataatatgtatattgaatatcgttcttacttcctgtttaacaggtttttaccaaattcctgtattttgacgagataaaacgtacgttttttttagtcatttttgaggggctttcgggagggtttgtgttggaaagctggtttttcgtacttgttaagctatctgattgataagaaagaatatagaaaaggaaaaataattggaagaaaggattgcaggttcaaaaagtagttgtatttttgtgcagtgaaaatggcgaaagaaaacgtacgttttttcgctatttttcttcttatacccatatacttcttattagcaatgacttacattgcaaaaagtgcctaaagccatataaaaaaagagctgttttcaaccactcgccaaacttctttacatcttcattaaaacaaagataatcaatcacctataagattaactccctttattcacattggaggggaaaaacggcaaaaacagcaggtttcgtaatttcatcttggaaaagctcccccttctgttaaagatatacaaaatacggagtattggttgcttagctcaataacagcttcaagacttgcaaaaccttacattattatgtatctttacatcaacgtccgtcacagacggatcaaacaactataatacgttaatacaatatatgaaagaaaaaatcgactcttccgacatccccacctcctatctgctctgcatgaaacaagattgccccaaagccactacttgcttgaggagaatcgcagaacaacagatcggcgacgaagtcaaactgtggcacgtcatcagccctaaataccaagagaagcaaaccgaccgatgtgcttatttccgccctgccgataaactgacctatgcgctcggtttcatcgggatgctggaccggatgccctacaaactgatgcaggaagccatttgcaagctgatgagacggttcggacgcaggacttactaccgcgtgcgaaaaggcgaacgcccgctctcgccggacgaacaaaaaagcatgttgaacatactgaaacagtgcggtatcaacgatcccggaaagttcgatgcctacttcgaggcatacgactggtaagttcacatgacgctacttgcctacgtattggttgtgccatacctatgtaacgaccgtttcctcggcatgaaacggttgtgccaagcttatgtaacaggcgtttcctactcaggaaacagttgtgccaagccgatgtaattgttttggcacagccggagcagcaaacatacccttgcgggaacaagtccaagactcgacgccgaacagattccggacagaagcgaatgggaaacggaaacataaaaaagaagcctctcttcacagagaggcttcttttttataccgaaaataaccaataaaaacttttcgatatagttaatcatcttatatgcttacataattgacaaaaggttttgatatagcgattatactaatagtgttactttcttaatgacattgcaaagatacgggtacttcccacctcctacaatacctatatgtgagtaaaaaaacgtcttttactacctaatcaaggtgatattcaggcgcaatacctacaaatgggtaacatcggaacctttttacctactaattgcgattgcacaccgttgacagcccctctaattttgccaaaaattaaaaaacgcaatgaaaaggttaactaatttattagcaatcactctactcacctcttgtgtaacggcatttgcacaggaacaagaagaaacaacgacagaaaaatccgcagtggaacaatccgcagacatttatgcagccggatataacaagttccgcttcggcggatatggggagatcctcgcaaactttatggactacggcatcaaccgtttccggggtacggacaacggaagcaagaaagaccatcgcaattcgatctccataccccgttttgtcttggccttcgattacaaattcaattcccaatgggtattaggagcagaaatagaatttgaggctggaggtacgggaagtgcctatgagatagaaaacacagaaaacggagaatacgaaatggaagttgaaaaaggcggtgaagttgctttggaacaattccacatcacacgtcttatccatccggccttcaatgtccgtgccggtcatttgatcgtcccggtcggtttgaccaacgagcatcacgagccgatcaacttcttcggaacttctcgtccggaaggcgaaacgaccatccttccttctacctggcacgaaaacggtatcgaagtgttcggtacgttcggccgaggctacacacgtttcaactaccaggctttggtcgttgccggattgaacgccaacgggttcgaccgcaatacatgggttgccggcggcaagcagggactattcgaaacagacaacttcacctcaccgggctatgtggcccgcctgaactatttaggagtaccgggattgaaaataggcggttccttctactattgccacaatacgggagccaattccgacaaaccggaaacatacgtcaaatatggaaacatacctttgcgcatctatacggctgacctgcaatacaaaaacaaatatgtcaccgcacgcgcaaacatgatatacggcaacctgagcaaagccgacgacctcagcagtgtcaacaaccaccaaagcggcggttctccttatacacagacaaccccgatcgccaaacgtgcggtcagctacggtggtgaagtggggttcaacctgcgtgcggtttgtaaagacaatatgagcgtacccgtaatctatccgttcgtccgctacgaatactacaacccacaggaaaaaggcgaaggcaagcacacgatggatttacgcaacaaagtaagcatgtggacagccggagccaattggtatgctttacctaatcttgtcgtgaaagcagactatacaacacgcaaaatcggaggcggcaaatataacagcgaaaacgaattcagcttggctatcgcctatatcggctggttcctcagcaaataaaaacaatataaacaaattaataacttatcaataaaaatgaaaaagaaaaattatttctatctggcagccttatcgctcgccatgacattctcgatgggagcatgtagcgacaacaacgaccccaatccggatggtggcggaaaagatccggtcaacctggattacagttctgaaaacgccagtgcatggggtaactatatgtataacgttgcaatgttgctgaacgacgatgcaaccatgctctacaattcttgggtaaccgactacgtcgatgagcagggttcacacggcccatatgccacgattttcaaagaccagactgccggagcttaccaaagcccgctctcgtgtatcgaggaaatgatcgaaagcggtatgtggaacatcgccaacgaagtaggtgacgccaagatcaaggacccgtataccaaatataccagcggtgacaaggaaggcggtctctatgccgtcgaatcatggtatagctggcattcgcgcgacgactatacgaacaatatcttctccatccgtaacacatactacggccgcatcgacgacaacgacgtgtccaaagtagacggaaacctgagtgcattcaactcttacaaagatttcgacgatgaaggagacatcgcagaacactcgctttcaaaactgatcgcttcaaccaacccggctctcgacgaagaaatcaaaacgctgattttcgcttctgcaaaggcgatccaggctattccgcaaccgttccgcaacaacatcgacagcgaagagtccgttgccgcaatgaacacttgcatggaactggccaacctgttgttaaatgaagtaaaaccgtatgtaaaccaaacattcggcgatcctgaatacgacgatgaccttgatgcaatagccgaacagtttgtcgatgcggtcgttcttcctacttataaagacttgcaggaaaagaacaagcttttgctggatgcggtaaaccagttcagacaaaacccaagcaacgacaacttcgaaaaggcctgcaatttatggatcacggcacgcgaaccgtgggaaaagagcgaagctttccttatcggtccggtcgccaacttaggtctggaccccaacatggacagctggcctttggaccagaacggtatcgtacaggtattgaattcacaaaactgggatgacctggaatggagcggaaactttgacgaagaagatgaagccatcggagccgcacagagcgtacgtggttaccatacattggaatatctcctattcaaagacgggcagccccgcactgtcgatggagcaaaataaacatgcctctgagacataaaacttgataatagatcatgacaaaccttgaaacagcagacaaatgcccgctgtttcagggtttcagagtaattacacaatgcgactcgcgttattcggaaataaattcagaaaaccaataaaatgatatgaagcaatcttacctgttaacatcctcgctattcctgctctttgcatgcgcagcttgtgaagaggacgataaaatggatatggataaaatagatgtcccgaacggatatgcgctgtcagcagggacttcaacgattttcctaaactcatcggtcgcctacgatacgaacgccgactggataacaggagccaactcgatccgtttcaacaacggcgacggtctctacgacgatgtacgcaccagcaacaatggcgacggaggcggtctcggacctgtttatgccggctattcctgcggcagttgccatcgcaacgcaggaaggaccaaaccgacattgtgggaaaatggcggatcgggcaactacggtttctcttccatgctggtctatatctcccgccgcaacggtgctttcttccgcgactacggacgtgtattgcacgaccaagccatctacggcgtcaaaccggaaggtaagttgtccgtcacatacgacaagcagactttttccttccccgacggagagacttacgaactatgcaaacccaattacacgataaccgaatggtataaagacagtatcgccccggaagatttgttctgcaccgtacgcatcccgttacgccacgtcggtatgggacagatgatggcaatcgaccgcagggaaatcgaagcgctcgctgccaaaagcaattatccggaatatggtatcagcggacgttgcaactatatcaccgagaagggtgtcaccggtgtcggcctttcaggaaacaaggcacagcatcttgacctgaccgtcgaactgggcttttcaagcgatatgggcgtgacaaacagccgctatccggaagagatttgcgaagggcaggctcagatcaaccaaggcagcatgatgggactctcgtacgaccagctcgacatatcgaccgccgatatggaagatgtggacctttacatgcaaagcctcggcgtaccggcacggcgcaacataaacgaccctcaggtcatcttaggagaacaaaagttttacgaagcgaaatgccatctctgccacgtcactacgctgcacacgcaagcgggcggttccacactgctcaacggcacacgtttgccatggctcggcggacagaccatacatccttattctgatttcctactgcatgacatggggtcggagatcatgggagtcgggttgaacgacaattatgtcagcggcctggcacgaggaaacgaatggcgtactacgccgctttggggtatcgggctgcaggagaaagtcaacggtcatacctatttccttcatgacggacgcgcccgcaacctgaccgaagccatcatgtggcatggaggcgaaggggaagcctccaaaaatttattcaaacaaatgagcaaggaagagcgtgaggcagtgatcgcattcctcaactccttataatttatccataagacaaactaaaatgaaacaactgataatcacaattgcagcattattactattgccgttggccgtcatggcccaatatgaggaagatacggaaaacggtgtcgtatcactaaacggcaaagaaggttttacaatcgctaccaagaagggggatttcgttttcaaaccttatatgttggtacagaccagtgctaacatcaactactacgacgatgaagggctggacccggcctacaatcaggacaatatacacaacagcggtttctcgatcccttatgccatcctcggtttcacgggcaaggcattcgaccgggtgacattcaacctctccatcaatgctgccggaaacggaggaaacatccttcaacaggcttggttcgacgtagagataaaaaagagttttgccatacgtgttggcaagttcaagactccgttctcgcacgcttacctgactacgctgggcgagacgttaatgccgacactgccgacatcgctcacctcatccgttatcctgccttattctcttaatgccgtgacaccgaacatcggcatgggattcgacctcggagtggaagtgcacggattggtaaaggataagttcggctacgaagttgggattttcaacggaacgggaagctccgtcaacgtggcatccaaaacgttcagcgacgactggcatatcccgtcattgttgtatgccggccgcatcacgtacatgccgaaaggagttatgccgtccaaccagggcagcccgaaccgtttgaaggaagataagatgctgttcggtctttccacttcattgaatgtggagagcgaaagcgaaagtacgaacgatttccgggcaggagcagaattcgccatgttgaagaatcgcctgtatctcggcgctgaaatctattatatgaatgtagggtttaccaaacggcagaaaattgacgagagctataactatttaggggggtacgtgcaaggcggttatttcgttaccaacaaactacaagcgacagcccgttatgacttcttcaaccgcaacggattggacacaaacggttttctgaatatgccggccgtcggatttaactatttcttcaccagctgcaacttgaaactgcaagccatgtatcagttcatcggacgtaccggacatgacacgcagcttgaccgcgacaacgacgacttaggattagccatgcattccggaaccgtcttacttcagtacactttctaatcgtaacgtcatgaaaagagaagtttattcattcatctccgggctattgctcttttcctgtcttgccatctcctgcgacgatggcaagatatatgatgaaaacaatcagacggaaagggaaggaggaacagtgaagttaaccgcccaaatcaacgggatagattcttggccaggcggttacagcgtcgtactggccggattcacccctgacaatgctttcgcacaaacggcaaaagggattagccagacagccgacgggacgataaacatggtcttggccggtattcccagtgaagtcacacagatcgaagtttgcgtcatcaacaaactacgcaaaaggattgccagtttctataccgccgactacacggaacaggcggataccatacggctggatgccggaaagttggatgccggcatgttcaacagtatccaaaccgaaattttcaatcgttcctgtacggcttgccatggaggaagtacggaacctgctgccggactgtacctcacggaaggcaaaagttacaaggccttagtcgatgtcgtagctgataaaagcgaggaagggctgaaactggtcaagccgggaagcgcggaggaaagtttcctgcacgtcatcttgcacgagaacattgtcaagtacgatcataccaacgtcatcacgacctccagcactctgacgttgctcgacgattggatcaataacggagctaaagaataagaaagcacatattacatggattatatcaaaaagacatacacagacaaagctgtcgaagttcaaatttcttcctttgccgggaaaggtggggttaccgaatatcacgttctgctcgctattacagaccggacattgccgttttccggacaacttcagaacattcaacgggcctatgtggcagttatccaagaggtgttacctgacgatgcgactgccgtcttccggcgctatttcctgagcgacgctgccaaccaagccgacttggtgatggtttgggaatgcgaaaattcctattgccctctttccatcgtggagcaagctccactaaacgggagcaaaatagccatgtggacttggtttcagaccggtatcactgtcgaaacgaccaaaaacggaatgtcgaaagccaaacacaaccgttatacacaatactggaccgggggctcttgcaatagggcttccaactccgagtaccagacacggcttttgctgaacgattacgtcttgcaactgaccgagcagggatgcaagttggcaaacgattgcatccgtacctggttcttcgttcaaaacgtggatgtcaactatgccggcgtcgtcaaggcccgcaaagaggttttcatcacgcaagacctgacggaaaagacccattatatttccagtacgggaatagaaggacgccatgccgatccgaacgtttttgtccagatggatacttatgccgtaaaaggcttgcagaccggacaaattcagttcctctatgctcccacccacctgaatccgacatacgaatacggagtgactttcgagcgggggacagctgtaacctatggcgaccggaaacaaatcttcatttccggaaccgcgagtatcgacaatcaaggcgagatcatgtatccgggggatatcctgaagcagacggaacgcatgctggaaaacatcgacaccttgctacaggaggcgggaggcggattgcaagacatcatgcaggcaatcgtctacttgcgcgacccggccgattatgtcgtggtcaagcaatatatcgaaagccggtatccgtcgtttctccacctgatcgtacatgctcccgtatgtcgtccgggctggctgatcgaaacggaatgcatagctgtcataccggcggatgcacctcaatatgcatacttataataatctactatacaaatgataaaagatatgggaaacatgaagaacggaaaatacagggaaacaagcaagatgagtgacctgatatgcgagaattatccgatggtccttgtgatgagccgcttcggtatcgacctggggttcggagagaaaaacatcggggaagtatgccggcagaataagatcgacacatatacattcctgactgtcgtcaactttctgacggaaacggagacaatcccggcagcggaggtccataaagatatctccatctcttcgcttatcacttatctgcataatgcacacgactatttcctgaacttccgtcttccccatatccgccacaaactgacagaggcgatcgtgagctgcccgaaagatgtggccttcgtgatccgccgctttttcgacgaatatgccgaagaggtacacaaacatatgtcgtacgaagagaaaaccgtcttcccgtatgtccgcaatttgctggaaggaaagaaagacccgaaatataacatcaccatcttccgcaaacggcatgaccagatcgagatgaaaatcacggaactgaagaacctgatcctgaagtattatccgggaccggacagtaacttgctcaacaacgtcctgttcgatattttcgcaacagaacaagaccttgcctctcataaccgggtagaagactacatcttcgtacctgctattctgtctttagaaaaacaataaaaacacttgccatgtccactaacattaaaataacgatagccgaatcatcctccatcatccggtgcggactggaaacactactgaaacgcttacctggattccgtatccagatatccgaaataacagcagcagactgtctgacagagggcttacgcatttataagccggacatcctgatcgtaaatccttccattccgggaaacttcaacctacaacatctgaaagacgaatgcggctgcccggatatgaaatgttttgcccttcaatataatgtaagcgacccgtttctgcttcgctcctatgacgatcagatatcaatatacgataatgccgatgagttgaaaaataaattggaacgcctcaacaccgaagaagttccgtccgaagaaggggaaaacgaggaccagcagacactgagtagcagggaaaaagagattgtcatctgtgtggtaaaaggcatgacaaaccgagagattgcagacaggttatacctatccacccacaccgttattacccaccgccggaacatcgcccgaaaattgcaagtacacagtgccagcggcttgactgtctatgccatcgtaaacaaattgatagagttgaaggacttgaacggctaacaaacagtaccgttccttactttattaagtaattttcaactctcaattttctgatttcaattaaatagccttatttttacgatctatactataaaaacacaatataaatatgaacctgataaggaaaacatacgacacgacggaagtgcaaatcacctcttttcaatcctccaaaggcataacggaataccatattttcttccaacagacgaactgcctggaggattttcacactcagttacagcacatacaagatgtttacgcccattcagtggaagagttgccgggtaatccggtcgctattttccggcgttattttctgagtgacgtaaccaaccaaacagatgaactgatggaacgggaacggctttccccctattgcgcactatcaatcgtacagcaggctccgatgaacggcacgaagattgcattgtgggcttggctgcagactggcgtacagacacaggtgttgccaaatgggttgtttgaggcgcgtcacggtgcatacggccagcttttaggtgccaaccagtgcaacagggcggccaattcggaataccagacccgcctgatcttccgcgattatatcctgcaactgacggaagccaattgcacactggcggctaactgcctgcgcacgtggatcttcgtacagaatgtagacgtgaattatccgggtgtggtaaaagcccgcaaagaagtgttcgcgacacaaaacctgacagaagaaactcatttcatcgccagtacgggaatcgagggacgctatttcgacccgatggtattcgtgacaatggacacatatgctgtttccggtatctgccccggacaaatccgctatctatatgcaccagaacacctgaaccgcacatatgaatacggcgttacgtttgaacggggcacagctgtcacatacggcgaccgccgccatgtctttatctccggcacggcaagcatcgaccgatacggagaaatcgtgcatgctggcgatgtcataaaacaaacttcccgcatgattgagaatatcgaagccctgctgaaagaagcggacgccactttgaatgacatcatgcaagctgtaatctatatccgcgatacggcggattatgcgcgggtcaaacgttatatagacgaacatcatcccagcctcccttatatcatcgtacgtgctccggtttgccgaaccggctggctggtcgaaatggaatgtacagcggtgacagccaaaggagatgaacggtttgcggcactttagccatttgggcagaatccttttatcataataacaacgaagccccgacggaattactctgtcggggcttgttttgtgtctgctctctttcctcacggaagtacaggcagcattgttattttttactttagtattaatgtaccacttgttcgccctcgcggggtaattgaccggtcggaaagaccggacacatggtcattatttgattataaaatctttatttcaatatagtagagacactgtttcatagtgtctctacaggagatcattattacttaacgatcgctttaacagcttcttcaccttcaacagctactacaactacgccctgaggagcagcaattgttgcatcacttgaagtgataactgtgttagcaactgtctggcccaagatgttagtgataacaactttcttaccttcagcgttagctacacgtacagcaccttgcaaagcgattactgtaacttcagatgttgcaatttcttcgttgtctgttgccagctgatcgtcaaccttattttcaacattgaagatcaaagctccgtcgccacctgttgcagcatgtgagaatgtagatgatttgtctgtcaaaaccacacaaccattctgaatcttcaaccatgcagcattttcaggtgcaataatcttattgtcatagttgttcgattcgaacaagaactgattttctacgccttcttccgttacattacctgcattttccggatgtacataacggaatgaccaagtgtaattcttatgttcgttaccgtcaagttgattcttgatcaaatatgatttagaagcaagatttttcacagaatcattataagcttccaaagcatcgaagctaatcttatcgttagccaaagctacgaattctgccggcaggatccacaacgtatcggcaacacggataccttcaacgaaacctacgcgagtataaccacccttgatatctgcataaggtttgtcctgaccgtaaacatctacagaatcctggaaacttaccaaatatttagctctttcgaagccagggatagccggagtagcgtgaacacaatgttctgcgtctgtaatattaccgtctttgtctacgtgaggaccatcttccgtacaaggtttacccggagttccagcaaagtcgttatgtgcaaccgaaatcaagtattgcggtttgatataaccagcaccacgattaacccaagcagtatcgatctggaatgacaaacctgttgctttgtcagctgtccacatacccagatagtcaacattagcatcagtcaagttgctattgttttcatccatcaagtattccttacggatagtttcaaagaatctcaagctgtcacggccgtccgttgcgctttcactcagtgcaacgttgttgaaacgacgatacaacggagttgtagaaggttcaacagtgaaagcagaagttcttgtttcattcaggaactgaactttcagaccagcactcataccgtcatcagcgataccgactttcttcgtaacacctgtattttgaatttcagtagcatgagcagtgctattataataagattcgacgatagcatagaagtccttaccatcatagtggttattttctttaaagaagaatgtatcaacaaccatattagaatcatagtttgctacacccattgaatacttgcttccataagcttcaaccaaacgatcctgttcatctttagcaatgacataattcgttctttccaactgagccagtcccggaatctttttcaaaagagcggcatcaacatcgataccatattcgtatgtagaaccttcaaccaaagcataatcgccagcatcctgcttaacatagatcaaagaatctttacctgtaccgttagcaatccaatattccattgagaacgggttcagataattgaatttatatctgttgaccaacaaatcttttgagtcgatatgtttgtaacctaacttcttatctttgatgattgcagagtctttgatctgaacaaacgttacgttgttcaacatatcagcacccgttgtaagtgtatagatttcaccatcttcattcaaacggaactgaacgttatcccaatctttcgcattcgggaattcacggtttacaattttaaccggagaaaccggttgagacacctctgcattcaatgtttttgtaataacccactggtatgcaggcatatgtaacggctcctgttcgtccaatgtcacccattcgattgcatattctttgttaccttctgcatttttatgaataggagcagccaatacctgaccctttgcattcttgatgatatacaaaccgttgtcaacagaagtcttatcactagttacaaaacagcctttcagaccgaaaccgatctttgtattaataggtctttcgccaatagttgcaacactcaaagatgtggtaaagtcctgcaatttaacgaacaatttagaaggaacacactttgcattaacagcatccatctcgctatcattcagatttatatttgcatatgcagcaccatacgttctaatatctgtgacatccttccaatatttttcaggttgtttctcatttttataacgagcttctttcacctgaataaacaaagagtcaacagacggcttataagagaacaagaattgatgctgagcatccaacaagccaccttcaaccttatttttaatgttatcagtccaaccgaatttcaagaaaccaataccagtactattagcagcagtatcgactttcaaatacaattcttcatttgcttttgatgttacataaacaaaattatggtcggatgccaaacctttgtttaacggcttagcaacaaatgcatttgaagtaaacggatttacatcagcctttgcatccggagtaaatgtaagaacattcttattatctttcaaataagcgttgatttcgtttgcacttaacacataagttcctgcgttaaagacagtaaacttaaccgcattagaaacgttatcggcctccttggccaacacttttttcacctgtaactgacctttattattagtagtcaaaactaaaacatgatcagcttcttgataggtaaacatgggttgctcctgctccaaatctgttgcataagtactggaaaaggcccaaccaccaaaagtttcaccaacagacaaaccaccattaatacttgtttccttgttaagtgccagatcttgaacatcagcttcagaaacagccaagaattcacccgttgctttatttacaaaatcgtagataggctccttaccttgtccttcttctgttattgttatacaccataaagaactttgcagatctgtaattgcagtcgttttttgaataacatacttaccatctttaatagcaagcactccatcttgtccctttgtaccaactctcaactgatacactccactcagcgctgccttatccaattttaaaattgcagcagcatcacttccttgtgcatagcctctaatattgcccgcatttacagctgagaaagctgaagagaacagtaagctagcacacaaaagagtagaaaactttttgttcataattctaaatttaatattaatactaatgtttataaaagttcagttcttatcgtacgtttgttaactattgtatcttgaaatcgaatacgtacgttttttttcgtcatttttttggagcattcagtaagttcgtgagcaaaagaaggttttttgtacatattaagctatctgattgataagaaagaatatagaaaagaaaaaaactttgaagaaagaattgcaggtttaaaaagtatatgtatttttgtagctgaaaaatgacgaaaaaaaacgtacgttttcattagtcatttctaaatatcctcttatttttctatatatcaacatcttacatacaatcacacacccaatttcactcttaaaattcttcatttacgcgtacattatataaattagtatatctttattaatcaacccattacaaaaactgtcaaaatgtaaaaaacaccttttttgcgaattactacccaaaacagcccttttcagtccctaggcaagacggatattttcctaaaatccacaaatcattcgtttcctgccgcaaaacaaatgtgtctgcggtcgaaacttttatttcaatcgttggaactatccgacttaccgaatttactaattctgtaagcgcagtctgcagaatctattttttatgtatctttggctattcaaacaccaagacaagagagaaaagcctatgtataagaatggtaaatatcgggaaaccgataaaatgagtgacctgatctgtgagaattatccgatggtgctcgtcatgagccgcttcggtattgcactcggattcggagaaaagaatatcggagaggtatgccgtcaaaacggtgtcgatccctgcacgttcctgaccgtcgtaaactttctgacggaagagatatccgcgccgatgacaaatattgacaaatgtctgtcgatcgaggctttgatcacttatctgcataatgcacacgcctatttcctggacttccggctgccccatatccgccgtaaactgaccgatgctattgcagactgcccgaaagatgtggcgttcgttatcactaaatttttcgacgaatatgcagcagaagtccacaaacacatgtcgtatgaagaaaagacagtatttccatacgtccggggattattaaaagggataaaagacccgaaatacaacataacgatcttccgaaaacatcatgatcagatcgaaatgaagattatcgaactgaaaaatatcttgatcaagtattatccgggacccggaagcaacctgctgaacagcgtcttgtttgacatcttcgcgaccgaacaagatctggcctcccataaccacgtagaagactatcttttcgtcccggcgatcctgactcttgaaaaaacaatacagtgatgcctatgagcgccttattaaacatagcggttgccgaaccgtctgccatcatccgcagtgggctcgaagcggtattaaagcgaattcccggattccgcatccagatcatcgaaattgccactgcggagcttttgcaagaaacacttcgctcacacaaaccagacatactgattattaacccgtcacttcccggttactacaccattcagcttctcaaggaagaaaccggctgtatggacatgaaatgcatagccctgctgtatgccgtcgctgatcatgccctgctgcgaccttacgacgaccagatcaacatctatgacagcccggacgagatccgccacaagctggaacgcctccatacgtcaccggaagaggaaaccgaaaacgaagaacagcagacgctcagcgcacgcgaaaaagaaatcgtggtctgtgtcgtcaaagggatgacaaaccgcgaaatagccgaccgcctgttcctttccacacacaccgttgttacacaccgacgcaacatcgcccggaaattgcaggtacacagtgccagtggtctgaccgtatacgccattgttaacaaattagttgaactaaacgatatcaaattataatccatgaagaaaaacaaactcgccgtccttacgtcatgccttgtcctgtcagggacattctgtacgcaggcacaaaacaaaacgccacaggaaatccggataccggatacttacaaattaacgaacaagtctatctaccggaatggctggatagatttcaacaagaatgggaaaaaggatgtatatgaagatcctacggtcccgatcgatgcacgtgtcgaagacctcctttcgcagatgaatgttgaagaaaaaacctgccagatggttacgctctacggttacaagcgggtgctgaaagacgacctgccgacatcggactggaaaaaacaactctggaaagacggcataggagccatcgatgaacatctgaacggtttccagcaatggggacttcctccttccgacaacccgtatgtctggccggcttcccgtcatgcctgggctttgaatgaagtacaacggttctttatcgaagagacacgcctcggcatcccgaccgacttcacgaacgaaggcatacgtggggtagaaagctatatcgccaccaacttcccgacacagttgggattgggacacacctggaaccggaacctggttcataaggtcggctatatcaccgggcgcgaaggacggttgttgggatataccaatgtctatgctccgatcctcgatgtcgggcgcgatcaacgttggggacgttatgaagaggtatacggcgaaagcccgtatctggtagccgagttaggtatcgaaatggcaaaaggaatgcagactgaccatcaggttgccgccacttccaaacactatatcgcttacagtaacaacaaaggcggacgcgaagggatggcacgcgtagatccgcaaatgtcaccacgcgaggtcgagatgatccatgtctatccctggaaacgggtgatcaaggaagccgggatcctcggagtcatgagttcatacaacgattacgacggattccccattcagagcagctattattggctgacgacacgtctgcgtggcgaattcggtttccgcggatatgtggtatcggacagcgacgccgtcgaatatcttttctctaaacacggaactgccgccgatatgaaagaatccgtgctacaaagcgtattggcgggattgaacatacgttgtacattccgctcaccggattcatacgtcctgccacttcgcgaactgatcgcggaaggagctattccaatgtccaccattgatgaccgagtgcgtgacatcttgcgcgtcaaattcctcgttggattgttcgaccatccgtatcagatcgatttgaaagagaccgacaaagaggtaaactgcgccgaaaaccaactggtagccttgcaggcttcaaaagaatcgctcgttctgttgaagaaccaggatgccgtccttcctttagatgtaaacaaaatttccaaaatcgccgtatgcggtccgaatgcagatgaagaggcatacgctttgacacactacggcccgcttgccgtagaagtgacaaccgtgttggaaggcattcggaataaggtaaaaccaggaacggacgtgctctttacgaaaggttgtgatctggtagatgccaattggccggaatcggaactgatccgttatccgttgacagccgaagaacagagcgagatcgacaaagcagtggaaaacgcaaagaagagcgatgtgactgtagtcgtgctgggcggaagtaaccgcacctgcggagaaaacaaatcacgttccagcctcgatttgccaggccgccaactcgatttgctgcaagctgtcgtagccactggaaaaccggtcgtattggtgctgatcaacggacgtccgttgtctattaactgggcggacaaatatgttccggctatcctcgaagcctggtatccgggttcgcaaggcggtacggccattgcagacgctctgttcggcgactataacccaggtggaaagctgaccgttaccttcccgaagacagtcggacagattccgttcaacttcccgaccaaaccgaatgcacaggtcgacggcggacgcaacaaaggattggacggcaacatgtcccgcgtgaacggtccgttgtacccgttcggctacggattgagttatacgactttcgaatactcagacatttcgatccagccagctatcgtgacacaggttcaaccggtcaccgtccgttgcaaggtgacgaatacaggtaaacgtgccggagatgaggtagtacagttatatgtacgcgatatcctcagcagtgttacgacctacgagaagaacctcgtcggcttcgaccgtatccatctgaatccgggagaaacgaaagagcttaccttcactatcgaaccgcgcgacttgcagctgctgaatagcgataaccattgggtggtagaaccgggagacttcaaggttatgatcggagcctcatccgaagacatccgcctgaacgaccgttttacggtagtggaatatggtaaagagcaggcaaacatatcggcagcttcccgacagcagaaatcagttattgccagctctactcaggagtctgctccgtcagtattagacggcaacccatctacggcttggaaagccaacaaaggtgaatacataacttttgcactcgaaaacaacgcctctcctaacaacatcgcgattgcctggaaagaaaaaagcaaagatgccaaatttgaaatccaactctccggtggcggaggccagttcctgaccgtatatgaagggacggtagaagctacgaacgagctgacgaattaccggttcaaaggcacaaccgccagtgatatccgtatcgtaataacctccggcaatgcaagtatctcggaagtaaaaatcaaggagttgaaaaattaagaattaagaattaagaattaagaaatgaatgcataagacaccatttcttaattcttaattcttaatttataaatagatttccccaaagaactccggacaatggaagttcggagaaggaagatcaatcggactccaacttacgaaatgcggaaattccgtatcgtccgcacatttatagaagttgcccattatcttttccggtaggttgtcaggatcgaggcccatcaaccggaaaggaatggcaaccaccaactcccagctataaacccccagtttctctgtaaaagcaacatgaggaagacttgaaaaacgacgtatcgaagcatactcttcgggggtcagagatttcttcgaatcacgcgattcccgataggaagcatcacatgttccgatacaattaaactcgaaattgtagtaattgggatcattcacccgcttcataaaaaactccacgcaactatcttgatagacaggtgaaccatccgtttcataaagagctttcaatgaattgccttttacaaagtaacgaatatacagattcactttcgatcttgcgatatcgaaagccacgataggcttataggaatattcctcccagttaatcacatcgatcgactctcgctgggccttttccatcaaaaagcctacggacgacagatccagtacgtccagcgtttccaaataagggactttcagtttcttcattatcaattatagatttggagtaatggtaaatgtaaataagaagtcagcaatacggataagactccgattatagccaaaacaataatgaccgatcctacaatcctattcaataaccatatacctcgcacgttaaaccatttcttcaatttagcaactatataagtgattccgaaccaccagagaacagcccccaccccaataaaagcaatgccacccgacagcatccaaacagaatgttccggcaagacaaaaccaaagcgggcaaacaaaccaatatatagcaatacgattaatacgttgctaaaggtaagaagaaaagctgtaataaaatcctgagtgaaagataactttttctcccgttgttttctaagattccggacaggattggattggaaaatataatagccgaaaatacccaatacgatactgccgatcaattgcaaaggagcctgattcgcctccacaaagttcaccacaactcccatccccaagcaagtcagtgcagcgtagatcacgtctgacagagcagcccctaatccggtaacaaacccatgccaacgtcctttgttcagcgttcgttgtatacatagcataccgatcggacccatcggggcggaaaccagtacgccaataacaattcctttacttatcaatcccagcattatccttctattttctgcctaatgatttgcaaagataacgcaaaccgggagcagaataaaatgaactcgtccatttttaaccaaaaaacacctgcaggaatgttttttagattacctacaggcgttttcacactttatgtaaaaagactatttagctttttccttttccaatatagctttcaactttgcaacgatttcgggatgttcggccgccagattcttcttttctccgatatcctgcttcaagttgtaaagctgttcttccttgctgttgcccaactcgatattcgtcagtttagcataagcagcaccattactcggagctatgtatttccattcgccgtcggagacagaaagagaaccggcaacttcgaccacatagtcgcgccctttcagatccttccccaagaatgcgtccagatgatcccggctgtcaggaccggccccttcttcgagcggcttgcccatcaggcttgccatggaggcatacaggtcgatctgtgataccaatgcgtcggagacacccggttttacctgagccggccagctcacaatcatcggaacacgcgtaccggcttcgaagatactgtatttaccaccacggaacggcccccagggtctatgttcgcccaacaattccacagcccggtctgcataaccatcattcacaacaggaccgttgtcgctactcaacacgatcaaggtgttttcggcaataccggctttttcgagtgcgcccattatttcgcctacggtccagtcgaattgcaacaaagcgtcgccacgagggcccatgccgctcttgccgacaaaacggggatgcggccaacggggaacgtgcgcgtcgttggttccgacatacaggaaaaacggttcatctttgtggttttcaataaatcggacagctttgcaagtgatgctgtctgcaatgttttcatcttcccacaaggcctgcttgccccctttcatgtagccgatacgcgaaatgccgttcacgatcgccatatcatgcccatggttcggactcggtttcaatttggtaagcaattccggatggtcttttcccaacggttcgccagggaacggtttttcatagctcacttcaatcggatcattcggatcaagattgacgatccgctgattctcaacccacacacaaggcacacggtcgcctgtggcagccattatataggaatagtcgaaccctatatctgaaggtcccggcgtgataaagccattccaatcctgtcctcccgtcctgtcagacaatcccaaatgccatttacctatagcacctgttgtataaccacactcacgaaacatatcggcaacagtcggctgttcgggacgaatgaccattccggcatttccagccgcaatccccgtgtcattccgcctccaagcataatgccccgtaaacagcgaatagcgcgacggcgtactggtcgcagccaccgcatgcgcatccgtaaaacggacaccttgggctgccaggcgttccacattcggcgtatggatcgttttcgatccgttgcaactcaggtcgccataaccgatatcatcggctatcaggaaaataacgttcggcttcttctgctgctgtgttactttttcttccgccttttgtctgtttccagaacaggaggccagcaaggtagctcctattcccaatacgattgttgatttcatgataataaattaactgttaattgataaaccctttctccattttgagattgtcaatccgagaatcccgaaaacgtcctccacactccgacaattgttttttcagcaaatctcgccgggagctataaccttattgttgacaaatatacaataaaacgaagtatatcacaattttccaagattgtaatctgcatacgaagttttctgctaatcctctatcactctatcactacaaaggttgtagctattcatattcaaacgtccaaaggcagtgatacaggacgttttcccctatcactcctctatcacttctaaaacaggacatttttgtcatacaattgaaaaccaacatattaccttctattacttttgaaaaagcatataaaataatcgaataaacaaatgtaaaaacgaatataacaggtattaaattggcggaatacggttcttcattccacaaaagctatctctttttttagcaaagacaagcacatcattccgtaaacacccccatgttgccatcctttacatccgggtgtagagagccggtacatccgggtgtaagagggggcaacatgggggtgtccggcaactaaagtaccatgccggacaataaaaaccacccggtttcacctattttatagccgtttttacataaaataatcgagtgatttataaggatggaaatcgggtatttattgcttttgttatttgtaatacgctactatacagatgtgtataagcgcaatttctgttttccatccaaattgcctgtgatagggtagtgataccgtagtgatagagaaaacgggcatatatcactaacgaaacaggttgaatatcaatcgataaaaaaggaatcagtgatacagtgacagaggaacaccgttttgacatacttcaataaacaattatttgtaaaatggtttcaatatattccctgccgagccatacgctccacattcggtgtcctataccagtcgttcaacgcacagcgaaccagattacctcccttatccgtcaaaaaaaggcaaaaaggtatccattactcccatatcatccaccaagaataacacaatattaggaaattcttgtgccagaagcaaccgactcgaaagaagtaaccgatcatcaaaaactctccttccggaccatttttccagatttccattccgtaaggagaaaagtaacttttaggatgtccgatatgattcccagcgatattaatatccataccgttctgcaatggattttctgtcacatgccattttcctatatggcaagtctggtagcctgcttttttcaatacttccggaagaagccggacacccggctccagagctgtccggttgggatatctccaaagcattaagcgagatacgcaaccacttggttcgcctcgatattcttgccatactgatctgtctgatcgacagttcgtccggccattagttttttgacattttgcgcaagtcccgccagtttccctatcgggcaccatctgcgaggctccgtttttaaccgaaaaaggcctttgttggaacaaatttattttcttcaacagatttaagggaaattcggttagtaagcactatctttgcactttgtaagcgaggggtatccttatattatcccccgtatgaacggaataccattaataaatcgacgatatgattctattctttcaatctccaacaaagacggtgttagctgtggaggctgcacacgctttctctcctgaagatgtagaaaaattagtttgggcttttagcgaggcaaaacctctccaggctgaaacattggaaggctggtatgttggtccacgccgggaaatgattaccccgtggagtacgaatgccgtggaaatcacccagaacatgggactcaccggtatatcacgcatcgaggaatacttccccgtttcttccggcgaagcagaacatgacccgatgttacagcgtatctatgacggtctgaaccaggacatcttcacgatcagtaaacaaccggacccgattgtttatattgaggatatcgaagcctacaacaaacaggaaggactggcattgagcgatgaagaagtagcctacctcaacgaagtaagccaaaagctggaacgccggctgaccgacagtgaagtatacggttttgcacaggtgaactcggagcactgccgtcacaaaatcttcggcggtacatttattatcgacggagaagagaaagaaagttctctctttaacctgatcaagaaaacatcggcggagaacccgaacaaattggtttccgcctataaagataatgtggctttcaacgaaggcccggtgatcgaacaatttgctccggccagcggcgacaaaccggatttctacgaagtgaaagaaatcaaatcggttatctcactgaaagctgaaacccacaacttcccgacaacagtcgaaccgttcaacggtgcggctaccggatcgggtggtgaaatccgtgaccgcctgggtggtggaaaatcatccctgccgattgccggaacagccgtttatatgacatcttatccgcgtacggaaggtgcacgcgaatgggaaaagatcctcgacccgcgcccttggttgtaccagactccggaacaaatcctgatcaaggcctccaacggtgcatccgatttcggcaacaagttcggacagccgctgatctgcggttcggtcctgacattcgaacacgaagagaacaagaagaaatatgcttacgacaaagtgatcatgttggccggcggtgtcggttatgctaatatgcgcgacgcgttaaagggcgatcccgcaccgggcgaaaaagttgtcctgttaggtggtgacaactaccgcatcggtatgggcggaggcgctgtctcttccgtaaacacgggccaatataccagcggtattgagttgaacgccgtacagcgcgccaacccggaaatgcagaaacgcgtttccaacgtgatccgtgcgattgccgaatcggacaacaacccggttatctccatccatgaccacggcgcaggaggtcatttgaactgtctctccgaattggtggaagcaaccggcggacatatcgacatgagccagttgcctgtcggtgacccgacactttccgcaaaagaaatcgtaggtaacgaaagccaggaacgtatgggtttgctgatgaaggaagaagatgttgcccatgtacagcgcattgccgaccgcgaacgttctccgatgtatgtggtaggtgaaacgaccaacgacatgaagttcgtattcgaacaggccgacggcgtgaaaccaatcgacatcaaactggaatatatgttcggtaaaccgccaagaacgatcatgaaggatcatacggtcgaagaaacatacgctccagtcgtttataaagaatccaaactgcatcattacctcgaaaatgtacttcagttggaagctgttgcatgtaaagactggctgaccaacaaggtggaccgttcggtgacaggcaaggtcgcacgccagcagtgccaaggcgaattgcagttgccgctgagcgacttgggtgctgtagcactggattaccgtggaaaagcgggtatcgccacatctatcgggcatgctccgcaggtagcgatgatcgacccggctgccggttctgtcatggcgattgccgaatcattgacaaatatcgttttcgctccactgtccgacaagctatcaggtgtatctttgagtgccaactggatgtggccatgccgtaacgaaggcgaggatgcccgcctgtacaaagcggtccaggctgcttcggacttcgcttgtgcactgggcatcaatatcccgaccggtaaagactctctgtccatgacacagaaatatggcgacgacaaagtgattgctccgggtacggtgattatttctgccggtgcagaagtcagcgacattcgcaagatcgtatctccggtattggcccacgaaaagaattcttacatatattatattgacttctcgttcgacacgatgaagttgggcggttccgctcttgcacaagttctgaacaaattgggtaacgaagtcccgacgataaaagacagcgaatattttgccgacgcattcaacgccgtacaagatgccatccaaaaagggttggttctcgccggacacgacatttctgccggtggtatgatcacggcattgctcgaaatgtgtttcgccaacgtggaaggcggtttggaagtgaacctcgacaagttgtcggaacaggacattgtcaagattctgtttgccgaaaacccgggtatcctggtccaggtgaaagacaagaaagcattcgaaaagttgatggaagatgcaggagtaggttttgccattatcgccaagccgacttccgaacgccacattctggtttccaaagaaggcgtccaataccatttcggcatcgactacatgcgcgacgtatggtacgaatcatcttataaactggatatcaagcagagtggtagcgtatgtgcaggcaatcgtttcgagaactacaagatgcagccactggaattcaagtatccgaagagctttaccggcaagctgtcttcttacggtctgactgccgatcgcaaaggaaagagcggaatccgtgccgccgtaatccgtgaaaagggttgccagtgcgaacgtgaaacgtcttatgcactgtatctggcaggtttcgatgtgaaagacgttcacatgaccgacttagcttccggacgcgaaacattggaagacgtaaacatgattgtattctgcggcggtttctccaactccgacgttttaggctctgccaaaggatgggccggaggtttcttattcaacgagaaagccaagaaggcgctggataacttctatgcacgtcccgacaccttgagtctgggtatctgcaacggttgccagctgatggccgagttaggggttgtttatccggaacatgagaagaaacacaagatgttgcacaatgattcgcacaagttcgaatcgaacttcatctcggtcgagatcccgaaaaaccattctgtcatgttcggttccttaagcggttccaaattaggaatctgggtggctcacggcgaaggcaagttctctttcccgtatgaagaaaaagaatatcatatcgcacttaaatacaactacgaaggctatcctgccaatccgaacggttcgccttggtcggttgccggtgtctgctctcacgacggacgccatctggcaatgatgcctcacttggaacgtgcgatgttcccatggcaatgcggttactatcctgaagaccgacgaaacagtgacgaagtcactccgtggatcgaaggtttcgtgaacgcacggaagtggatagaagagcataagaaataatatttggataggaagttgcgttataataatatagcgcaactttttttatttatgaaaggtttatctattactcatttaaatattatccattatgaaaaagattgctttattattgttgatgttcgtggcgtttcaggtcagtgcacaggatttccatttcttaccgaagatcggattgaaccttgccaatatgacaaatagtgacggaagtatgaagcctgggttgaacgtcggggttgccgccgagtttcctatcaatccgcaattttccgtcgagccgggaatctattattccatgcaaggagtgaaagaatcagaaggcggaatctccggcaaaatcaaaaacgattacataaacattcctatctatgcaaaagcctatctatacaatggcttttatgcatttgcgggaccacaattcggtttcttagcccgttctaaagcaagcgcctcttataacggtactgacatttcggtcaattcgaaagatgcattcaaaacatttgatttcgcactaggaatcggcgtcggctatcaattcgatttaggcttgctggtttcaatgaactataatataggattcaccaataccttatccgatggcgacatcacattaaatggcaactccatgaattgggatggggagaaatcccgcaatggcgtcctgcagatcaacctcggttggagattctgaaatatccgcttgccggtataaaatccgacaggcatccattttgaaacggataggcttcgaagaacattcgaatgcttatccgtttttttatgctgcccgacattataaatcacggattcttattattgcgtcttccgtattaatccctatcttcgcgacctaaacaataaacaagtacactgattcatgaaaaagttgctatttatcttctttacagcaggtcttatacagggatttagctcttgtttccacaaagacactccagataatgcacttgcattgatcccacagccccaagaaatgaaagtcgggacggatcatttcaaactgactcgccgggcagctatcacactcgacacatccaatcctcagttaatagggatagctcggtacttcaacaataaagttgcccccgcaacaggttttgaaattccggttgaaaagcacggcaacattgaatttaagctgaccgacaataccgctttcggtgcagaaggatatcgcttgcaggtaaaacatggcgatatcatcatcaccgcccatcaaccggccgggatcttctacgggatacagactttattgcagatgcttccccccgaaataaaaaacagccagaaacaaaaaggcatcgactggacggttccctgtaccgacatcaccgacaaaccccagtttgcctggcgcggacttatgcttgacgtcagccgccactggttcactaaagaggaagtaaagaaatacatcgacgaactggcagaatacaaaatgaatgtattccactggcatttgaccgacgatcaaggatggcgtctggaaataaaatccctgccacgcctgacagaggttggcgcctggcgcgctccgcgcgtcgggcaatggtggcaacgcgcaccacagcaaccaggagaagaaacgacctacggaggcttctacacacaggaagatgtgaaggaagtattggcatacgctgcagaacgctacgtacgcgtcattcctgaaatagacgtgccgggacatagcctggcagcactcgtcgcctatcctgatctggcgtgtatgaaagcaccatcggctgtcggggtcggcaacaagttttacggcgaagacgaaaacacactttgtgtcggcaaagatgccactttcgagtttatggacaaggtcttgacagaagttgccgccttgtttccggatgaatacatccatatcggaggagacgaatgtttcaaaggtttttggcacaaatgtccacgttgccaagctcgcatgaaagcggaaaacctgaagaacgaaaacgaactacaaagttactttatccaccgtatggaaagcatcttgaaagaaaaagggaaaaaactgatcggctgggacgagattatcgacggcgggctggctcccgatgctaccgttatgagctggcgcggtatggagggcggaatcaaatcagcaaaagccggtcatcatgtgatcatgacaccgaccgaacattgctacatcgacctctggcaaggagaaccatctgtcgaaccggacacctactccatgtgccgcctgaaagattcctacagtttcaacccagttcccgacagcgtgccggccgaaatgatactaggaggacaaggcaatctctgggctgaatccgtccccactttccggcatgccgaatatatgacctggccacgtggatgggcacttgccgaagtcctttggaccggaccttccaagacggattgggaccggttctggccacgtgtcgaacgacatttcgttcgtgcggaccaggcacagatcaactatgcacgcagcatgtacaatgccatcgtcactccttactatactaaagatggtgttttggaaatcaaactggatagcgaaccgggcaatcttgacatctactatacattcgacaatacggaccccgacaacttcactccgaaatatgaagctccgctccgaatacccaagaatgcgacttggttacgtattgtcacttatcgggacaacaagccgattggcaaagttataacattgacaatcaaagaacttgaaaagcgggcggataacactcgccatgtcgtcggcaacttgtaacataaatgtaacatatatgtcgtaaatgcgaaacagttttctcgttcctttgtaaataaaatcatagagtccaaaaagttaggaatgaaatcaggaaagattattgcgcttggcctgttggcgctgcttccaattgcgatgaaggcacaggaagctcaggaaatagaaaagctgaatgctcgtatcgattcactttcgcaggagacgacaaccctggataaaatcgtccgtaaactcagcaaattcaaagtatccgcttatatccaaggacaattccaatatggtcaggaagatgccaccctgaaagtcggtgacaagaacgaacatgaagacaaaggtttcaaccgtttcggcatccgccgcggacggttgaaattcgaatataatgacggtatcggaaccggtgctgtacagatcgaagccaacgacaagggtgtcagtttccgtgacctttacatcggtataaaagatccctggacaaaacgctgccaactgatggcgggtgttttcaaccgccctttcggtcacgaaatcggctactcgactagcggattagaatctcccgaacgtgccaccatcatccaatacttcttccccgacgaacgcgatttaggcgccatgctgacactccgggctaaagagacaagcccgatcggttttctccgtctcgatgccggactgttcgccggtaacagcatcaatcgggaaacagacagccgcaaagacttcatcggccgcttgggagccgaaaagaaaatcggcaactggggaaaatggggagcaggcgtctcctactacaacggcggagtttacaacccgacgacaaccgcctacgaactccaggataaaaaattcatcgcagtcgacaaaggagaaaccggtacatacatgaaacgtgagtacatcggcttggacgctcagttctcattcaaaaacagttggggaacgacaagcttgcgcggtgaaggactgttaggtacacaaccgggtatcgccggcagcagcaaaagccccaacacagggacacgcccgggcaatgaaccggagaactccctgttcaagcgtcctttcatcggctactttttctatttggtgcacgacatcggaaccactcctttctctgccgtcctgaaatacgacgtttatgatcccaacaccaagttgaaagggaatgagatcggcgttgaaaacagcttgacctccaagaccgacctcgcccagagcacactcggcatcggcgctttgtaccgtttcaacaagcatatccgcgtgcaagcctattacgagttcaacttcaatgaaaagagcgatttcgtaaagggatatgaaaaggacagggaagacgacgtattcaccttgcgtctgcaatataagttttaatacaaacgtaacatctgtttcacacgcttgcaacactcctgtatttactttgcatacagaaatttaattcaaaacagagtaatgagaaagacaattgttatggccgcagtagccgcctgtatgtttgtatcgaacgtgtttgcacagagaattaaagggagcgacacttgccttcccttaagccagacggaagcagaaaacttcatcaacaaaaataaatcggcaaagataaccgtgacgggcggcggctccggcgttggtatctcagccctgatggaagggacaaccgatatcgccatgtcttcccgtaagatgaaattcgatgaaaaagtcaaattgcaggaagcgaagaaaagcaccaaagaagtggtgatcgcttacgacgcactggcagtagtcgtacacccgtccaataaagtgtccaacctgacgcgtgaacagctggaaggcattttcacaggaaagatcaagaactggaaagaagtgggcggtgccgacatgaagatcgtagcctattcgcgcgaaacgtcttccggaacatacgaattctttaaggaaagtgtcctgaagaacaagaactatatgaacggcatccttagcatgcccgcaacaggagccatcattcagtctgtcagccagacaaaaggagccatcggctatgtcggtttggcttacataaacaaagaagtaaaaccgattcatgtctcttacgatgcaggcaaaacattcaccgagccatccttcgagaatgcaaaaaacaaagcatatccgatcgtccgtccgttgttctattactacgatgtaaagaatgaaggcaaagtgaaaccctttatagattatatcttatcggctgaaggacaagcaacggttaaacaagtcggttatatcccggtaaaataagtcaaaaaccatatagctcccacgcttgacacgggatcgcgttaaagccggccatatacatctgattgatatggccggcttttttgcgtccccgcgtcaagcgcggggacaagagggaatgcacagtcattatttatttgtgcataatatcggttgattttgcacattctttggtttattgtgctacctttgccacatatatattttttatttacacattttacttacatgaagacattaacaattggggatctgaaagcccgcattccaatcatccagggtggaatgggcgtaggaatctctctctccggcttagcctcagccgttgcaaatgaaggtgggattggcgttatctccgccgccggtctcggtctcttatataagaaactttctcccaactacaccgaagccggcaatctgggccttgcagccgagatccggaaagcccgcgagaaggccaaaggcattatcggcgtgaacgtgatggtcgccctttcagacttcgccgaactggtgaaaaccagtattgcggaaaaggtagacatcattttcagcggtgccggactacctttggacctgccgtctttcctgaagaaagacagcgtgacgaagctcgtccccatcgtttccagtacacgtgccgtccgcatcatctgcgaaaaatggaaaaacaactacgactaccttcccgatgccgttgtgctggaagggccaaaagccggcggtcatttaggatacaaggagaaccagctggaagacgagcatttttcactcgaagaactgctgcctcaggtagtgaaagaagtttcccacttcgaagaaaaatataacaagagaatcccggtaattgcagcaggaggcatttacacgggtgaagacatcaaacgcgtgatggacctgggagcatcgggcgttcagttaggaacccgtttcgtcaccactaccgagtgcgacgcttccgatgctttcaaggaaagctacgtcaaggcacaggagaaggatatcgagatcatcaaaagtccggtcggaatgccgggcagagcaatccacagtcattttctcgaaaaggtaaaagccgggatgaaacagccgaaggtctgtcctttcaactgcatcaagacatgcgatatctcgcgaagcccctactgtatcgtaacagccctgtacaatgccttcaaagggaacttcgagaacggctacgctttcgcaggaagcaatgcctggcggacaacccgcatcatgtcggtgaaagaaacgataagcgagctgatcaacgagtggaaacgctctgaccaaccgactctttcctcccgataaacaaaaagtttcatcggcttggaacttttgtttcccgccgatgaaacttttgttgcttgctgatgaaaatttattctcctgcaagtaaaaataaactttcaccttgagaaaaaagtgaaaactttatcatttatcctcttttttcttcatattcgtctcgataacgaatgcgacaatcaatcccaaacctccaaacaaaaggacggaggcgccataagctgaactgatagcttcatattcattacgaaaatccaatgaatgactattagcagcaacaattaaattacagaaaaagcctacaagtatccctaagccgattcccatcaacagacatcccgtttttaaagagctaaacgaaaaacgaggcaaaccatacgaagggaggctcagcctttttcccaaatcagcaatatccattctttcactgatcttctcaatgatcaacaaacgttctttacgacgaacgaacagttcaaacaaagcgtaaatacctaaacaaatgaatccgacaaccagcggagctgtaataaaatccatcataactgtattgttttaaatgattaattaatttctttgctacttttgacgcatctctttccgaaaggttacagatcggggggaaaaaatatattgtatttttgccgatgcaagttgtaacctattcgcccggcttgcgtccattataatacgatggagttgtataccgacacatattatatacaaaggatacaagcgggagatacggcatgctttgcctgccttctggataaatacagccgtcctgttcattcgttaatcctaaaggtggtcagaaaccgggaagatgcggaggaactggcacaggatgtgtttatgaaggtgttcaagcacctctcgtcgttcaaaggggaatgcagtttctccacgtggatctaccggatcgcctacaatacagccatctcggaaacacggaaaaagagacacgagtttctggcgatcgaggaatcggttattaataatgtatcggaacaagaagtagccgaagcactagacaggacagacagctccgaccagatacagatgctcgatgccgccctcgcccaattgccacccgatgagcgggcgatcatcctgctcttttatatgaaagaaaaaacgatcgacgaagtggcgacgatcaccggattgactgcatctaatataaaagtgaaattgcaccgcatacgaaagaaactgttttttgtattaaaaggaatggaggaacaataaaatgacagagaagaatgacatattgaaagacctgttcagccggatgccggaagaggagcttccggcttcgttccgagccaacgcgataagacagatcatggccgaagccgaacggatacgcaaacgcaacgaacgctggggatggattgccgtcatcgccgcctcgctgcttatggtcggtatcgcaatcgcttcattcctttatatgaatatttccccaatatccgtacagatccccaatatgagcacactccccttctatgcctatatcgggatgcttgccctcatcctgctgggagccgattacaaattcaggcaactattcaaaaggaggcagatgtctcagaaagaaaagatgtaagtagcggtattacaagcccaaaagattgttttttccatgcaaaaagtcttgcaagtcagaaaaaagcattacctttgccccgatttttgagagatgacaacataatgtctaacttactaattaaaacaaacttaagtattaacaattagagaatggaaaatttaaagaacattcagcccattgaagatttcaactgggatgctcttgaaaagggcgattcttacggtgaagtaagcaaggacgatcttgtaaaaacgtatgacgagactttgaacacagtaaaggacaaagaagtcgttatgggaaccgtaactgcaatgaacaaacgtgaagttgtagtaaacatcggtttcaaatcagatggcgttgtatctatggcagaattccgttacaacccggatctgaaaattggtgacgaagtagaagtctacatcgaaaaccaggaagacaaaaaaggacagctgatcctgtctcacaagaaagcacgcgctacacgttcttgggatcgtgtaaacgaagctcttgaaaaagacgaaatcatcaaaggttacattaaatgtcgtacgaagggcggtatgatcgttgacgtattcggtatcgaagcattcttgccgggttctcagatcgatgtcaagccgatccgcgactacgatgtatttgtaggtaagacaatggaattcaagatcgttaagatcaaccaggaattcaagaacgttgttgtatctcataaagctcttatcgaagctgaacttgaacagcagaagaaagacatcatctccaaacttgaaaaaggccaggtactggaaggtacagtcaagaatatcacttcttacggtgtattcatcgacctgggtggcgtagacggtttgatccacatcacagacctgtcttggggccgcgtttctcatccggaagaaatcgttcagctggatcagaagatcaacgtggttatccttgacttcgatgatgaaaagaaacgtatcgctctcggcttgaagcagctgactccgcatccttgggatgctttggatccgaacttgaaagtgggtgacaaagtaaaaggtaaagttgtcgttatggctgactacggtgcattcatcgaaatcgctccgggcgtagaaggtctgatccacgtttctgaaatgtcttggacacagcacttgcgttctgctcaggacttcatgaaagttggtgacgaaatcgaagctgttatcctgaccctggatcgcgacgaacgtaagatgtcattgggtatcaaacagctgaaagctgatccgtgggaagatatcgaatctcgcttcccggtaggttctcgccacatggctaaagttcgtaacttcactaactttggtgtattcgtagaaatcgaagaaggcgtagacggcttgatccacatctctgacctgtcttggacaaagaaaatcaaacacccgtcagaatttactcagatcggtgctgaaatcgaagttcaggttctggaaatcgacaaagaaaaccgccgtttgagcttaggtcacaaacaactggaagaaaatccttgggatgtattcgaaacaatcttcactgtaggttctatccacgaaggaacaatcatcgaagtactggataagggtgctgtaatctctctgccttacggcgtagaaggtttcgcaactccgaaacatctggtaaaagaagacggttctcaggctgctgtagacgaaaaactgcagttcaaggtgatcgaattcaacaaggaagctaagagaatcatcctttctcacagccgtatcttcgaagatgaacagaaaggcgctaagaaagaaactggcgaaaagaaatcatctgcaaaacgcggtggaaagaaagaagaagaatctgcaatggtaaccggtccggttgaaaagactacattgggtgacattgaagaactcgctgccctgaaagaaaaattggctggtaaataattaccgtcttttcaaataaaacaaaaggagatgtccatccggatatctccttttttattgcctgaaaaaagaatagagaaagtgctcttagtctacctccttgatcacttcctctacctgttcctgttcaccgtaatattggcaactttcgccgatacccaacaaagcattcacttcatgacgcttgtccaagtccgtaaaataagcgtccactaccctataaatatcgaacccgtccgttgaaccggccgccagattcaatgattctaccaatttacctgtagctttgcgaatttcagctttactgatcaaatgaaactcgttgttgtgaattaattgactctttcccatgatgtttgatttaaaagttatacttgttcttcattaataaccattcctcaaagcggtaagtttaatcttgctgcttcgtttcatgcactaaatatacaaacatcctcggatctttcaacctttcaagccttttattttcaataaacatgaaaaacaaatccgatcccgacctcacgatattccatgatgagcaaggagaaaccggatctccaaacatagaataagttctattctatttggtattgtaaaaattaatgctgaaatttgttcacagataatataaaagatatgggcacgaacgaagataactacaatgtaactattctgatcgcagaagacgaggaaagtaatttcctactattaaaaaccatcttaaaaagacactgtaacgttctgcaagccagaaccggcctggagctattgaaagtttttgctgaaaaaggagccgatttgattttgctggatataaaaatgccggaaatgaatggtatagaagctctgaaagagattagaaagaaagacacgaacataccgattatcatgcagtccgcctatgccttcgaaaatgacatggaagccgctcgtgctgccggaagcaacggatttatcaccaagcccatcaatatcgtcgaactgaaaaaaacgatctccaaattcttgccgcagataatctggtaagaagctgaaagccgacatattataaaaaaatggaatagccataacgattgttatggctattctatttttttgcttttccacagacaccttaaccagcaaaccctccccttcatttttatcaaaaacctttcattttacggagatatccgcattaactttctttataaactcctcccgaacaaaacattgaatctccggtttaagaggtgggtaaaattatttttcacaagaaaaactatacccgaccggcactaatggattttcatatagaacgaaatatactttattacaaacgaaactaaaatgaacagaagtcagcttatcaatatcctggctcaaaaaacaggattaaacaaaaaagatgtcaaacggacaatcgatgaaatgcaaaaactaattatccaggaagtcaaaggaggtcaaagaatctgcctgcatggtttcggctcatttaaacctcgttttcaatccagccgcccagcacgaaacctgaaaaacggtacagccgtacagctgtctcccaggaccatcattcatttcaaatgcgctccccacctgttggagcagatgaacaaataaagaataaaaaagagactcacttttacaagtaagtctcttttttatttactcagctattgtcggggtgagaagattcgaacttccgaccacacgccccccaggaccccattttttcagatatgtaaagaaatgattatcagctttatgttaaaaaaaatcgctttaattttgcgggtatatcgtgcaggttttagcaccttttgcaggcaacttattcctgcatcttttcgatgatagaaaggaagcggtcggacagctccttgttgttacgtatggcctcgaccaacagtttgtgagactcgaaagcctgctctttattgttctgtatagcttctgccaatagtttgcgcatctcagataactcatcgatggctttgtccaaggtagaagagctgttaacgtggttggcattaccggctatctgcgtgctgttgtcacctacagggctgttggtaatactaattgaagatgcaagcatttcacccttgccagtcaacagccaatctttattgaatatattatcaaatgccgcattaaacctaatcaaaaacgacttggtcagtgcatattttttacccttagaagcacttgatacattgggcgcactcgctcccatcttttcggcaatttctttctttgtatgcacaattccttctcccataagatatgagaacgcctgattaatcctttcctccattgtcaccatacttcttgtattgatattatcaaaccgttaaaaattatcaatataataataatacacatcttgtgtgttcttattataagaataatgatattatttttgccccgtatttataaacagttttataaactcacgataaaaataagaaataaaaacaagatataaataagaagtttactaaaaaaataagatgatgatagatttgagaacgcccgccgaacgggcaagagatgagagaaacaagcagatttgcgaccaataccggaaatacatcaaagagatgccggatattgcgccccaccgccttttccggtttattgccgaagatataggtatgaccgtaccaggagtgagaaaaatcatcataaacgccgggctgtaccgctgcggtatggtgaaaaccgatagttaacaatgctgcagagggaggagaagcgtatgataacacccattgaaccgaaagtcaacaaggagggcagatactccgtcacggaaacctgcaaattgctgggtatccaccgcaattcactccgaaagtatacagaactgggactgatcaagtgcggcctgcgcaagcagaccggacgcaagttttatctaggtcacgaaattatccgcttctggcggacgctgctatagggtgacctgcaaacacacacaacagatgaagacgaatacattgttaaaaccatacataaaaatcaccacacccgactctcgctatttcgtatggataaggagaccagatcatgaggggaggtctttcatgacattcaatttcggcatggatacggagtttgccgaccgattagaccgcctgtcatatctcacagtagaaagcatcagccgtctcgaccgcgagctgtgcacgctcatgttcagcctcaaaggcgatacgaaagagtgtataagtaagatgatagaggacatccccgatatcttggacgggttgacttttcttataaactctcaaataaacactgcacaccatgattaaagctgaagacatctacagagccagcaacggcgggctggacatcatactatattattacccgcaagcatcggagtgcgtgaacaacaagaagcatttcaaacgccgtccggacgaagacgacgcatcggcctgcattaaacggtttggcgatgtatataaagtgaccgattttggagatcaaggcaccgccatgagtccgatagacatctgcatgcaggaggagaacctgcgattcacggaagccatcgccgtactagcagaccgctaccacgtgaccgacgagctgaagcggagcgtcaacaagccagagatacgcaaacgtcccgccaaggtcgaagagcaagagggagcaaaattcttcgagctggaggacaaattcacccaagagcagcttcaagtattgggaccaaaggtgaagcaggagcatgtggaagcccttcactggcatgtggccaaatcattttcctatataaagaaccgggaagtcactaccaaatacagtaccccgtcttaccccatcttcatgcgtgaatgccaagtggaaaaccccgcaccgggtaaaccggatgtgttctataaaatatacgaacccctgaaccccgacaagcagtggcgtttctcctacacgccggacggggcaaagcccaaggagtacatcaacgggttggcagagctgaaagcctcatacaggaaatacaacgatgaagaagaacgtattttccgttctgatcccgccaatgaggacaagccctatcagttcaagaagctcgacgaggcaatcatctgctccggcgaacgtgacagcctatgcgtgcggtcgctgggttactttccgctatggttcaattccgagacctacaaggtgtctcccgaagagattcgggagatatataaatatgtggaacgtatctacaaccttcccgatatcgacccgaccggcatccgcaaggggacggagcttgctctacgcttccttgacatctacaccatctggctgccggaatggcttggccattacaaggaccggcggggcaagccacgcaaagacttccgcgattttgccgagctacgcccggaaaaaaaggacttccagaacctcatgacgctggccaccccagcgaagttctggaccgagaactacagcaagcggtcgaacaagaccacctacgagatagacagcatctgcctgcattatttcttggggcttaacggtttctgcctgctcaaccaaggcaaaggcgaatacgtgatggtccaccgggaaggatgcgtggtatcgagggtgtacccaagggatatgctggaattcctcaagaagttcgccattgagcgcaatctgccgcgggagatacgcaacctgatcgtcaattcacccaagtgcgccgaggccgcctaccagatgatggacatcaaggagctggacttcagcgattgcacggaaacatcgcaagacctctatttcaagaatgccgccttccggatcaccgccgaccgtgccgacaagattcccctaaaggaatatcacggcacctgcgtgtgggactctaacctagtaaaccacaacgtaaatatactgccacccatgttcgacatcaaacaccgcaaagattgcgacggtaaggataaattcgagataaaggtactcaacaccgacagccacttcttcgcctacctggtcaactccagccgcatccattggcgcaaagagctggaagacgcttggaaggaaaatacggcgtcatccggtgaagaagaagcctacaaggagcagtacaggtattcgatagacggtcccatgctttcgcaagaggagaagcacgagcaacaagtgaacctgatcaacaagatattcactatcggatacatgatgcacaaccacaagtcgccctccatggcatgggcacccttcgcgatggacaacaaaatcggcgaagaagacgagtgcaacggccgaagcgggaagtctttcttcttcaattcgctgaaggcattcaaaagcatcgtccccctcgatggccgcaacacgaggctaatggagaacccacacgttttcgaccaagtgggcgatgataccgacatcctttttgccgatgactgtagcaagttcttccccatggagaggttctacgacatcattactaacggcatgtcgatcaacaagaagaacaaggactcgttcttcaaggaatacgaagacagtccgaaactttgtttcagcagcaactatgtgcccaaggagttcagtccgtcaactaccgggcgcatgatctatgtggtcttcagcgactactaccacatccgcgccgacaccaatgattacctcgaagaccgcaccatctccgacgacttcgacggcaaggacatcatgcgcgggccaaagtacacggaagaagaatggaacaacgacctgaacttcttcatccaagccctccagttctacctgaagatggcatccatgcgcatcaagatacagccgccgatggacaacatcatgaagcgcaagaacaaggatgacatgggaaccttgttcgaggattgggcttatatgtatttctccaaagaaagcggcaacacggataaactcattccgaagtctagcgcattcgaggagttcaaggcattctccggagcggccaaaagctattggaccatgaaccggttcactaaagccataaaagcctttgccagcatcaatcctgacgtggcagaactcaacccgaaggaactgcgcaacagcagcggccgcatcatccgaaaagtggatggcaaagcaacggaaatgacttacctacgcacttactcggaagatggccggacaccaagagcgttgatggaaagccgaaacacggacgatgagaaagagccttttaaaggagatagctaagatgcaacaaattaaacaaatttctttgcaaatgatataaatatttatatctttgtagagtcaaacaatagttcttacatagatgaaacggtataaagtccgcgaggtcattaaaatgcttgagaaagatggctgggttcaattgaaaggaacgcctggcgatcatcgacagttcaagcaccccactaaaaaagggagggtgaccgtcagaggaaaagagagtgaggttttgagccagtttcttttaaacagtatttggaaacaagcggggtggttatagcaccccgcaaaaacaaaatatatatggaaacgataaagataaaaatcgattggagcgaccataactttggggcagtgaccgagtgtgaggcgttagatggtatcgttatcgcaacagcaaagacatacgacatgctgatggaagaattatccaaggctattcaggaacatattgccagcatggagcatgacggcgagaccgttccggaatggttacggcaaggacgatacggatacgatatagaattaggcacagcagccttgctgcgaaaatgcgaaagattcacatcattggctgccatcgccagggcttcaggtatcaaccaacaacaattatcacactacgccagcggaatacgtactccacgaaaagagcagcggaaacggatcgtggatggtatccatcgcataggacaggaatttttatcagttgtatgactattgtttgacgacaagtttaaactgatcatttaaggagatcttttcccaacaggagagatctcctgtttttttgttctatagtataacactctgatacctattacagtctataaggcgacaatatgctatttcaagagcgagccgcccagggcgccaagtttccctacacccttcaacatcctattttttatactttaaaatgtaacctgtaacctatatttgaaaaagagttataaataagaaagttaagtaataaaaatagggttacgtttttggttactttttaggttgcacttaattattcttttgtaaccaatcaggggtgttactaaacacttctggtgttacaattttgtaatgggtctatctaaaaggaatgtaacaaacaaaaacactgaaaatgaaaagattaaacatctatcgttgcaagttacactgttaaacttttttgcaacacttagactctatacagctgttattgtaaaatgttgacggaatttgcatcaaccagcaagtttacactaatacgaccattcattatgtcttgctttcaatctgatattttagtatatttgtaaatgatcaccactaaacaacataacggcatgacaacgaagattaacctacccacacacctctccgaatatctcaaagggaaattcgggacctcagacaacattatccgccttccggcaaacagtagcctctatcatatcgtctacgaactgctccagcgcagaccggtcaaccatcccatcgaccaggggaacaccgagattcacctcccatcaccccgtgcctcacacctgccaaacggaaagccggtcgagtatttcaactacatcagcaaaagagacaccgctgtgctcatcaaagccattaacaccatgctaaaggccgaagcacatgagtatttcgatgaaaacaagcacgtgaaaggaatcgattacatcgagtcggcctacgctttcctcttaaagtacggcatagagcacctgacccccgaagccctcttgaaagactaccagcgctggcgggcaaagatcgggcgcaagatgtcttcgcgaaaaaaacacgcacagaaaaggccggcatgttaataatatgtaaattggtaccgtttttcatgttaccgggtggggtagattgtcctttctctcatgtagccggtttcacgcttcttttctgtttaacaaattaacacaaataccaccgctattaatccgaacacgtgcccgaaaaaaattcggtatcaacctacgacaccgcttttagtccttcctcttatggtattttgaacgggttatgctttcccgttcttttgccgaaaaaacaggatgaaccgcatacaacagatattcaacgcaacatgggctatcgaacgcaaggattaccttaatcttatttcgatcatacagccttccatcaaggccggtaatttcgccgacctggaaaaattgttatccagagaccagacctccatacaagccgccaacctgagcaaccttgccaaggcgtgggatttctacgatgagaacctgccggaaaactccattggcgttatcaccctgaacggcatgctgtacaactgggaatcagaacgcattgccttgtacctggaagaagcactactcaatagcaagatcgcgggtgtcgttttcaagatcaacggtgtggggggcatggtaagcggattgaacgaaataaccgacatcatcgcgaaagccgggaaacctgtcgtttcggtcatcacaggctgctgcttctctgcccactactggctggcttctgctacccggaggcgtttcctgatcgatacagcatcacaggtagggagtgtgggggtcgtaggcacttactacaatgccaccgaatcaatgaagaaagaggggatcgacttccgcgaaatctaccccgatacagcagacctcaaaaaccgggaataccgtgacatcgccgaaaagaacgatgaaaaggcgttcaaggcacacctccagaaggtgcatgccctgttttgcgaagctgtctccaaaggcctttccataccttataataaagagctgcccctgttccgtggtgctatgttcatgggagacgaagccatccaggcaggaatggcagacggatacggcaacgtagcagacgctgcacgctggattctggcacaacagatgatcgaacagacaaaagatattgtttaacacttttaataattgggttatgaagaagattaaaatggctgattttgcctcttccgtgctccaaatactggggctgaaagaatggaagaccgagaatgacaaaaagacgctggacgaagccgacatcacgaagttgaaatcgttcggctttaccgacaccttcatcaacgctttctcgaagtcgctagccgatgacttcaaggatgaaagcgaagacgacaaccagggagaaccggctgcaccgtccgtatcggcacaggctgccatcgtgaacggcttgctggcccagcagaccgccaaactggcggatgccatgcagcagatcgaggcgatggaaaaaacgaacaccgacaacaccgaagctctcaaacagaaaaacgaagaaatcaacacactcaaagggcgcatcgaagccctgggtaaactgcccgaacaaacacaccctaaccaaactttggataacccgatggccatcaacctacaagacgagaaccagctgtgcggatggcaaggcgaaatgttcgccatggaaggccgcccgtacaacctgcgtgcccgtgccaccctgttggcaagagagggcatctctttgcaggtgaatgccgaaagcagcaccgactacagccgcctgaaagaagacctgggcgcattctaccgcgtgcgctggcaagaccgtttgcaatcgttcttggtgaagctcccgactattgaggctatcttcccgctcgaaagtggctatcaggatctagcaaccttggtcaatatctggctgggtgagttctcgcaggctgacaacaccatcgacagcgatttcgataaggtgacgaaaggccactatgagttcgactccgagaccttgcgcatgtattccgtgatgttcgtccataagttccgcaacctgaaggagctggaacgtacctggatcggatcactgaaccgcgagggttcgcaggtcatcaaatggtcgttcatcgaatacatcctggcagaaaccgccaagaagctgcacaacgagcgcgagctgagacgcatcaacggtgtgcgtcgcgatccaaacgtcaacgaggccggacgcgccatggaagcagccgacggcatttacgaatttatccgcaagaaagtggacggatatatggatatcaacaaggaaaaggtggtctaccagatcaaaccgttcgaactgggcgaaattaccgaggtcaacatcggcgagaagttcttcgagggtacgagcatgatcccggcggtttaccgcgacagcggacagttggcgctctacgtgccgtcctacatggtcgtgtggtaccacaagtacaatgagctgcactacggcgtgaaccaggactacaaggcgaacatgatgtacgtcaaggagtacccatccgtgaaacttatcccggtaccgaatgccgacaatcacacacgtatcatctggaccatgcagggtaacatcaagtgctttgaacatgtcccgggcgaaatgacgcgcttcaacatcgagcagcaggactggacgctgaaggtgtggagcaactggaaggaatccgtttgggcacgtgccgtcggctacaagtacaccaagaaggcagacatggactacagccgtcaaatgatcttctgcaacgagatggaccgcccggcttcttctttcatcgatgccgaaaaagataagaacccgtcggcagccatccacaccagcatccaaacggtggccaacacccaagagttcgccatcaccgacatcgagggggcagaagtgggacgcttgatcaccttaaaatgcggaagtgtggacaaaggggtgaagattgagaaaagcggcaagttcgagctgatctcagccgcatggacacccgccgtgggagacacgatcaagctgatgaagcgtgccgacggcaagtttatcgagatctcccgcgcttcttctacgcttaacatgctccgcttcgatgataatgccactactcccgatgtgagcgaaggcaacgagttcgccacttcggccaatacagaggcaacggccatcaccaactttaccggggcaaagcaaggtgaagtctacaccatccatggggcaggatcgaccaatgcttcgaccatcgccaacagtgggaacttcgtattgaccaatgccatgaccctgaaagagggcgcgatgatccgcctggtattcgatggcaagaagttctacgaagtggaaagacgctaacatgtataacattaaacatataggattatggcaacatacgtaaataaatcagtgccccgtccagcaggcaatcccggaaacgggattgccctgaaggacaaaatcgtgatcatcgacaccgacgatatcgaaacatttccggcaagggacgaggccggggtggtcatcgccgaagctataacgctcaaggcttccgccaagcctgtttacctctatctcacgcccggtaccgtggaagtcacctccactgccgagggcgaacccgacgctatgggcttcaacatcgcgatcaagggcaaccacccgggcaactcgcaagaggttcgcgagttcaagtggaactggctgggacgcaagtgcatcatcatcgtgcaatattgcgacggtaccgatgccgacctgttaggcacgccctgcaaccccatgcagatgagttccagcttcaccgccaacaaggacatgacccgcacggagttctccttcgcttccattacaaaaggaatggatatcgccatctaccagggcgaagtgcccactgaaacgcctgctgtcagcgaagattcttaagcctttcatactattaacaaaaagggcagccctaacacaaatgggggctgccctttttcatacccggtatgcccggaagtctacatcggcttcttggaactctgtttcattcgaatacctatttgatattgatttcaaacattcaattctcaagaacgaatgagtgacttttgattttaaccccccttgttttttgtttacaattaaacccctctgcctaaaataaagaaaagctaacacgtcttgtttgaagagttgaaataattcgtacatttgtgatgcccaattaatttcacaatatatatgaatccattttctatatgtaatccgtaaagtcgggttaaggtcctgtgaacctttgggcgcatattgagaatggattcgccttttttaacaggatggattattacaatttcgaggatcttgtttccagtctcgcttcgggttttacgattaatgagaacaggaaatattggtttgtgagaactgttggtggtacatattattcgcatttcttgaatggaggatatgtagctatcgattatagtgatatttccaaaaaatttctagatgaattaccggaaaaagaagagtctgcgttgatctctctgaaaacagcatataaggatagacatccaaatgctaagaacgcagggaaacatgctgctcaattatatcgtttttacagaggaataaaagagggggatgtggtaataataccatctccggattctaatgagttatcatttgggatagtaaaaggggctatgtatgaacaacgcctcatttcagatactgattgcccatttatgaaacgaagagaggtaatctggaaagagaagtcttcaaaacataaactgcaccccaaattacagttagcgatatcatcccgacatgctatttctgacatgactgattatgcacaatatatagactgcgtacttaaggatttttatataaaggaagaagaaaccaatttaatattaaagatacaaacagaaaacgacgtaacattggatgatttttgctcaatctgcgctatacaagatcttatcgccgacttttgtagcaataagggtatcgcatttgaaaaagagcatcttgtcatgaaaattcaaatggagtctccaggatggttaaaattgacagggaaaaatttttcgggattattgctgttcggagtattcttaaatggctgttttggaggaggattagaattcaagaaggatgctgaaaatgtcaaattttctatttctacgaaaggaataacaggggctataaatgaatatttagatagggaagctgacagaaagttggttgaatctgcagcaagggcaattgattccatgaaaataaaaaagccagaagatattgaaccttttatcaagttactggaggaaaggaataagataagaaataaatattaaaccggcaaatagtaaaacggtattagagagaatgcgataatcatccctatgatgataactttatagtctatctgtttggataaatcaagcctatgacctctaactagacatatcaagccttgaataatcaatatagataaggaagttatcgttataaacgttcctacacaagataatatgtttcgtgctaagtcaaacatgattttaaattgcatgcaaatatataacgtttttattatctatattagtacataatgggcgatttctcgttatttacgaataagattcattatttgtgtcgtatatacccgagggcagcccgatgctgacgactgccctcttttttaaaaagaactgaggtatggcaaatatattgactgaaggtgcagaaatgttaactaaatccctcacatggggaggaaagatgacgtttgatcaaataaataaattggactggttgaaaacaacgtcttactacggaattaatctatatatccaagaaggaatacgaaaaggatggattaattgcatgtgtaaagaaggaaagcctactgtttattatgctacccgtaagggacgtaaaatgtcaaacgaaagagaataattaaaaattttagaatcagaggaccagattaaggtttaatgtctcactaatttaatgagtgatccttctttttcaaataaaagaggataattagcaatacgagctcttatttggcttacgggaaccggatcagaatcaactttacggtgatataatccacgcttattgacttcatcggcaatttcgcgacttgtcataggacgatcatattctttcaaaatgatttcaatagcttcatgtagtttcaattccataattgtaaaatttaaagattggcaaatataaggaattctatggataaacaacaattcaaatactggattaggataaaacggttccgtccagagcagttcggcactaggacaaagcgtaatccgattaagctaacaactaaatatattttctccctttccccttgccattccaaaaactttccccatatttgcagtgcactacatttgaatcaggcgagtgatcgccgactgctttgccgttggctttttttatgccgattggtaaactcataatattcttaatacaaggttccgacccccgtgtggagcgttaatgcgcccactgcctgattcaggtgtagtgcaacgggaaagcgggacctttcttttgtttcccctctccttatctgttaatttatcgtttcatttaaagcactactaaaatgaaagcaaacgtattgacctcaggctacgcgcctgccaaagcaagcacctacttgcaagtgatgaaccgccttgccacggcgaaagcacgggtaaccgcccaagtaaagaaactattggccgcaatggactgccccatcgagacggcagccgacgctcactatgtgaagtgtaccttggcttgcctcctatcccccatctgcccgcccctcctggctgtggctgcctaccaactgtatcaagcccaaacgaagaaaggaggtacgatatgacaagaaaaggaacatatgattgcaccgacttatacatcgagaaaaaaatacgctacgaagaaggaggcttctttgatgggaatttctacaccttgcacataggcggagatacgatttcctgccttatcatggagcaactgaaagacatgcataagttactgggacaagtcattgaagccgaaaccaaacgccgaaaagctttggaaaaaatctcggaatcatttcctgtaccggtctttttcggattagacgaagaaagatgaaaccacagtaaatacagagggctgatcctttttaaaaaggtcggccctctttgttttgccagactcctaagcccccggtagtcttttcagtacctcatgcctgaagcctatctttgccggaaaacacccacaatatgaagaatatcatcaaaaactacctgtccggcgcacgctgttatgccgaaggcgtggccctgtatgaacgctacgggcgcaacaccgccctccgccgcgccttcttgaaccgacccgaaagccgcatgatgcgcctcacgctttacgaagaactacgccgtctggccggattgtccgtctatgagttcgaacacctggaacgccatgtcaccatccccggtgccacaccgccaccagtagaaccacacctcggaactagcgatacgcccgctgtaccgcaccttgaccctgtcagtcccaaggagtgcgaacgaatacgcttccgcgaccgctttaccttcttgaagtcaaaggattgccccgatgtgctgaagctattggtgaacgacatgttcgcctcttacgatgcttaccgcgaagcccacaacacactggcaggccaccccgacgatgcgcccatggatgacaccgccccactggccgccactgccgtcgaagagtacctgaacgaccgccagatttgggaagaactcacccattaccaagagaacggcacgctcctgggcaaccaccccaaagtggcaaagtacctgaaatggcaggaatacaagacactgacggacttcaaccttgttcaacggcgcaagaacgctgccagcaacatctccaaataccgggcaaagatcaccgcagccacctccgatgaagaacggctgaagctcgaagcgcaaatgcgcgaatggatcaccgtaaaggaactgtgcgaccatgagatcgaacaacgcaagaaaggagcctgatatggaagaaataccgactatcaagcctactcgcctgaatctcgaccgcgtatccatggaccgactgaacgccatcctctcgaccgggtcactcgacacgctgagcgaagccgaacggcaatatttctatctcatggacatggtgcgtggcctgacggccaagatgaagttcgaaaagcaaaacaagtacgtcaccaaagccgggataataaagctgctgaagagcgaacaatacgggctgtccgactggatggcgcgacaggtctacaccgatgcgatcaattttttctaccagcgtagcgaaatatcagccgaagccttctgcaacctctatgccgaaaaatgcgaagcatgggccgaagagatgtatgccagcggtgacgtgaaggaagcccgtaacctcctgaagctggcgggcgaatatcgcggttgcttcaaacccaaggaggcagatatcccagaagaactactcaaccagaagcgcgtcgacatctacacggccaaccgagaagacctagggcttccggccatcgaccgcaagcaattggacgctttcattgattcgataccggaactatccaccaccgtgcgcgacaacctgaaagaggatgccgggctgaagaagttcaacctcaaaaaacgtatgctctatgacatcgaagaacttagcgaagaagatagcggtgaatgacgacatcgccgtcaagtttgcccaccacgtgcagctactgaccgacttcatcgataccaccgtgcttgtcgtcgtagctgggcgcggtatgtcgaaaagtaccgtggtacaggcacgccgctcctaccgctgcgtgcacgccatgccgggtgcaccccttgccttcgtggcaagcagctactccagcctgaaagacaacatcatgcccgccgtgcagcacggttggcaactgatggggatgtatgaggggatgcactacgttttctgcaagataccgcctcgtgagtggcgttcgcactgctcgatcatcgtcaacgactaccggaacgtgatatccttttggaacgggtgcgtcatcttcctggggtcactggatcgtccctctctcttggcaggtaagtcggtcgtgcacctcttttacgatgaagccaagttcgaccgtgaagataaagtgaaccgtgccatgccaatcctgcgtggcgattcgctatcgttcggccactcccacctgttcctgggccttaccatctcgaccgacatgcccgatgtcaacgagggggaatacgactggttcttccgctacctgcccaacatgcgccccgaccggatcgtagcgatctgccaggccgccttcgtgcgcaacgacctactgctccggctagagaaagaacgcgccagggaggcccccaatgaccgtaccctacgccgcctggcccgtgaggtaacctattatgaccaagggctgaccaaactgcgtcgggggcaaacctacgtcctgaacgcttcttcgttggtcaacgtcgacatcctaacccccgactacctgttcaacctctataacgggacgctggagttccacgagttctgcaagtcggtactgggcatgcgccccggactacgcaaagatatccgcttctacctcctgtttggcgaacaacacaaatactacgacggttcgccggacggcctgcctgccgacagctgtaccagactcaagtacctgcaagacgaccagccgctcgacgggggcgtggactttggtaacatgctctccttcgtgatcggtcaacaacggggcaacacctaccgggtattgaagaatatctacgagataccgcccggatggttccgcgaactggccgaccgcttcctgcgcttctttgctccccactcctgcaaggagctgaacctgtattacgaccgagccggtaacaactttgcccgccaaggtgaagactacgcccgtaagataaaagatgccatcgaaaaggatgccgatggtgtgcgcacaggatggacagtctgtctgatgagccgccgccagagcaacataccccaagccgaagaatacggcttcatgcaagagctgatgaaagagggcggcaagaaactgccacgcctgctggtcgatgccgtcaactgtaaggagctggtgagcagtatcgagaaagcacccgccggtatccgctattcaggtacggaaaaaatcgtcttcaaggtcaagaaaagcgagaaacttgcaccgaagaagctacccatgctctccaccaacttttccgatgctttcaagtacctgatgatgcgcaagaggtggcgcaacatcgtgaaactgcaagccggtggtgcgaacccctacgtccctggcttcggggaagactgactccctacccgttacaagcccgctctgtcatatttcacccaaaacggggagaggcaattgcctttccctttctgagcggcacgcgctccggagcatgtctgttttcttgtttgcgaattttttctggcttaaaacactctccctaaaccttttgacggaaatcatcaccaaaaaacgaccgtgtaaaccgctgttttttggtgtcttttccttttttagcctccttcctttcctttacaggtaaaaaataaggcacatggatacaatcgatttatacgccgccatcgaagagatgaagcggatcagtgataccggaggaactttctcgatgaaattccgcaaatacaaccgacacacatccgccggtggggatatggtcaccgtcaaggcagcaagactccgtagcaaaacctcagacgagaagatcgagaactcctcctacaagttattctatacagacacggagacaggcctggccgccaactgctggcaggtactgatcatggagtttaatggtatgaaaacggttgtataactatggactttggacgagatcccgacttcgaccgggacgattatgatgattacgataattataactacgattgagatatggaaataagacgtgttggaaatttcggactgatcaaccctggcaacggccagctttactcgtttgacatatcgggcaaaggtaaaggatgggagccatcaagcatcatgctgggcggtagcagcggcacctgtttcaccaagaaaatacgggtaggtggcatcgatatcgtgcccatgggcgacaataacgacctgccgggcgaggtgcaacgcctgctcgaccgcttctatgccggtgaagggatcatggggaagatcgccgggctgcaatggggcgatggtccccgtttctacaacgatgccatcgaccgggagaacaaccgcttttataaggaatggacgctcgatcagcccattgaggatgatttgagccggtgggattaccgcatcttcatgcaccgatgtttggtagacttggtacacatgcagggcttcttcgtgaagttcatccgtaaccgtgccccgcgcatcggtggtgcaggacggctggtgaaactcgaacacatcccttaccagaaggctcgcctggtctacccgaaggagggtgaagaagaaccctcacggatcgtgatcgccgacttcccctatcccgactatgccaaaatggaagtattaccggttttcgacccgcacgacccgttccggtacccggtatcggcacgttattacaatatatattcctttgccaaggagttcatcagcacgccccgtttcttgggagctttctcttggctggaaattgccgggacacttgccccgctgctacacagctacaacatgaacagctccgcactgagcttgcacatcgaatcaccgcaggggtattgggacaaagccgaggaacgcctgaagtcggtctgtcagaagaaaggcatcccctacacttctaaactactggaggcatacaaggataagaccatggagaagttcgccgagggcatgactggggtcaagaacgtagggaaattcatgcacacgtcttctttcttcgatgaattgtcccaggaatatgaaggctggaaagtaacacctatcgacaagaaggtaaaagattatatcgaagctcagatacgcatcagcaacaaggcagacgctgctgcggccagcggtttcggtatcgaccccatcctggccaacctcatactggagaacaaattgtcgtcaggctccgagaaactgtacagcatcaaggtgtacaacgcatcggaaaccgccatacccgacatgatactctgcaagcccgtgcaggaatacatcaacgccaacttccccggtacgaagacacgaattggactgtaccgcaccattgtcaacgccgaggagaatgtttcaccacaaaaccggataaagaacaatgaataatcagaataacctattttgggatggttccggtttagacctggattgttttgacgctatggactgtttcgacagtgcccctgaagaagggaaccgctacatccgtccaaagctgaagccgttcaaggaatctcgcatcatctacgaacacgccgtggagctggcggaagccattgaaattgacacaggcgtaaggtatgacgcggtagtcagcggcaacttcattttcggtgatttcatcgaggctttcatggtccgcaacaactgcaaggcggtacgcatggatatcactaccctttcattgggacaggaaaacatcgacagcctgcatacgctattggacaaaggctatgtggatagccttaatctgatcgtgtccgcctatttctatgcacacgaagcgcaccgcctgataccgtatatatacggtcgcttggatatagacaaccgtttccaactagcggtagccggtacccacatgaaaacctgtctgatcgagacattgggtgggaaaaaggtaatcatccacgggagtgccaatctcaggagttctgccaacatcgaacaattcaccatcgaagagaatccagagctatacatgttctactgtgaaattgacaacaacatactaagtacctattcaaccatcaacaaagaaataagaggagagcagctgtttagcgcgatccggaatgtttaacacgtaaagaaaggagtctactatggcatcaaacggatcacaagacggaggcggtggaagcggcatcaagtcttccacatcggcttcacgccgtgcgggttctctaccccagtggatgagacccgacaacaatgtccctttttaacaaaccccgggtgcggtgcttatgccgcgcccataaagaataacctgtatgcaactattcaatttatatgatgacggaagccaggagatcgtagaagctgtgggtatgatttccgacaacgtggacttttcgaagtgggcccccattctgccactggccacacgccgcctgacagccatcgtgggcgaggacgtgctgcaagctatagcggagctttacgggaaaaaggaagagccggaactggtggcagccacacagaagcccgtggcgttcttcgcttggagcatgctgatcccaacgcttgacgcacaacacggcgcgagcggaaggcagaagaaatatggcgagaacgagaaagggctaaccgccttacaagaatacaaagacgaacagaacatcctgaatatcgcctacgaagccgtagatgcactgatcgacacgctggaaaagggtgcgtacaccttctgggaagagagcgaggcgaaacgccgcacccacaccctattgatacgcaacaaggcggagttcgatcgctattataccatcgggagtcaccgcctttatttcaccctgctaccgctgatacgggaagtgcaagacacggaaatcgcccccttcgtggaaggcgaacgcatggtgaagatgctgcaaggcgatccggaactgcttccccttgcggaacagtgccgccgaccgctggcactgctcaccatcaaaaaggcagtggaacgcctgcccatagaggtcatacccgatgggatcgtgcaggtacaacagatgggatcgatcaaggagaagctccgggctgagaaagaggcacgccgacaggtggccgagtcactcgaccgagatgcagcccgctatctgcagaacctgcaagacaccattgcccaaatggataacgacccgaccaacgatgacctgtatatcagccaggcaacgctgcaatccaagggcatcactttttaaactggcaacgagatgaagataataaaataccgggagcgcatgctgcaagtccccgaacttatagacgaattcacaccggcacaataccgccgatacctggaaatctccctgttgaacgaccgggggatactcagccgtcccactttgcgcagtaagttgctcacactgctgcttgacgaacgtaccgatctctccatgcagcgggaggaaaccatcgaagaggcattaaaccacatcgacctgaccctaccgtttatcttgccaggcgagaagcgcgaccggatgaacctcaatacagggctgaacctgctgaaggagtgggacggctggacgggaccgggcgacatgctcgacggggtaacctttggcgcattcattgactgtaacagcctcttgaaactgttggcgaagacaaagagccgggaacggtcggaacaactcaccaccgatttctgccggaaactctaccggaacgaggcacgtcccaaggctgatccggacgaaatactctgcgcccacgccctgatcctgtttaataacgtcatgcggacactccaccacgatccgatcgacatcaacggcgaaccgctccgtttctccatcctctttgagaaatcggaaaaacgaaaacccgatgacggcacaggctggatgggaacggcattggagattgccgagacgggcaccttcggcacctaccgcaaggtactcgacacgccactctgggacgtgctggtctttctctaccggaaaaaattcgaacacatgcactctaaaagataagtaatatgatacgtatcaagacactacgggaatatactgaagcgctgctccaacgcatcccagccatccgttccgctacgttggtcaacgtggacaaggacatgagcgatgccctaaggcagatgaaagtaagggaattcccggcactgttcgtcgtcgtgccctccgccgatgatgattctgcttaccctgacaacgtagcagaagtaagccaatgtctgctgttcctgctcgaccgttccgaccaccagaggcgaacgcccctgcaagtgttggaagagacacaggaggtggtggaaaccctgaagcagcaactgcgcgaagacgcttgccaaccttgccacttcatgtcggggctgggtaacctctccaccaaccctgaaacgggactttacagcgattactgcggatggtcggtctcctttaacctgtctgaacgatgaaccgtccggacaacatacgcgatgccttcttccgccgcaccttggaacgcgatttcaagacgatcctgcaacgacagaaagccatcgccgaagaacgcatctaccgggagagcaaccagcgacaaacagggcggctgcacgccttcctgacttcgcctctgatcagaaccggtatcgaccccatccgcatacaggtagattaccccatttatatccgcttcctggacatgaaacgaaaaggtaaccaccgcatctacaaccgccagctgtggggtatgatctaccgggagacattgccggaactccgctacggcttcaccgaaagcatacgccaagagattgaagcacagcttcaaggactgttccccgagtaagatacgcacaatactttttcatggtattagtttttatgggttagtaatgtttagtttggagaccgtccctcctgtgaaggtggggcggttttgtttaactccctaagaagaacgttccttgatggctattttttcacattcccctatttttaggcatttgtgttgcagccaaagtaaataattcataacttcacagtgttcaaacaataacacttacttgtttatcatgaatagaatctacataagtttacttctaatcgtactgttttttagcttattttttgtagtaaaatcatactacgaaaaaagaaagcatatcagtttgcccaaaaaattctacatgcgaaaaggttatttgaaacaagttatcaataccctaaacaaaatagttaaatatccaagcgatgatgtatatcttgatttttcacacatagaggaaattacaaagggttcttatatggtgttgttggcgcaagcagaaaaagcgttaacctcaggaaagcttattttaatacacaataagtttcccaagtcaaaaaaagtgttagaaatactatctgaacaaaaaaattatattcacaaaaatataaatctaacagctatcgacgcaatttctactgcaacggttgatactaaagttgtttcggatattctaactgaattaagaagaattggaattaatgaagactatcggatcttttatgattttttagttgaattgatcgggaatgctgctgaacatggaatccaaaataaaaatattaattggtggttgctatattatcgagtaccagaacaaaagagtttcaagtttgtttttgtagatatgggggttggtattataggctcatacaaacgttctaaattgcaacgttttataaaactaaaacaatcgtcatggattatccaacaggcttttaatggacaacttggatcttcaactggacaatcaaaccgaggtaggggattaccttttattaaacattgcgtagaaaaaggattcatttctaattttattttgattacaaacaatgtatctttgcatcatgaaaacggagagttgcaagtatccagtaatccaaactttgtagggacatatttatcatggactgtaagtaaagaaaattttatatcatggaagaattcaaaataacaatagctgaagattttagcaacacccctggcggacgttgggaaagacttggtccccactccggcgaagaattttacaacacattacttttccctcgataccaagaagctatcaaggctggcaaacaattacacatctatctggatggggtcaaatcatatccatcctcattcttggaccagtcatttggagaattaggacgtgctgaaggagagaataatgtaaacagtatcatatgttttcacaccagcaattttgaatgggtaatagattacatcaaaaatcagatatggttcaaaaaataaaatatattattttgattctattattgatagtgactctactatcgtttttatattttatacatatattattttccaatgcttggctggagtatataaaagtggattacaatcttgttcctgtagatgttttcagtctctttatatcatcagccatcactatatgggtaggatattacgttgtcaagaatttgtcggaacaaaggtttgaaaaggaaatgctcattaatgatttaagagctatagagaaagaaatcgaacaagttgaattggcttttagaacatcaagaatggtagatttggcctatgtgtcaggaaaaatgaatacaataaaacgcttgattgatagatttgcttttacagctgagatgtcaaacaattttataaacaaagaagtctcatcaatcaatgatacgtttttctctctatattctgcttctactgactttgatgcatcatcaatgaattctaatgacatagattgcacatccatctatcaacttacagatgatcttgtaagaaaacttagaacagctacaatccatttaaataagaagtaacttttttcttccccatccccttgccattccggaaagttttccccatatttgcagtgctaaacattttaaacagggcgagtgatcgccgaccgctttgccgttggctttttttatgccaaccggtaaactacatatgatattattataatacaaaggttccgacccccgtgtggagcgttaatgcgcccacagccctgtttaaggtgtttagcgacgggaaagcgggacctttttttattcccctccctcttgatttattaatgtttcattttaattcgctaaacaaaaatgaagacaaacgtattgaacgtagccggaacaactatcggcactgtaagaaccagtcttgctcgcctcacaaataaggtgagcagccaagtgaagaacctcctggaagccttggactgccctatcgagacggcagccgacgctcactatgtgaagtgcaccctggcttgcctcctatcccccatcttcccgcccctcctggcagtggctgcctaccaactgtatcaagcccaaacgaagaaaggaggtacgatatgacaagaaaaggaacatataattgcaccgacttatacatcgagaaaaaaatacgctacgaagaaggaggcttctttgatggggatttctacaccttgcacataggcggagatacgatttcctgccttatcatggagcaactgaaatatatgcataagttactgggacaagtcattgaagccgaaaccaaacaccgaaaagctttggaaaaaatctcggaatcatttcctgtaccggtctttttcggattagacgaagaaagatgaatgctgcaagctctgcacgagttcctctgggtaaattcatcgaagccgagaataaacggcgcaaagtattggataagctcccggaaacactacctttaccggtgtttaacggattggatatatgatagaattattgttactgtttatattggtttacgtgcttccctgcctgatggtaggggcattgggatacgggttgaatgatcacttcagattctatttctgggtgtcgttcttcttgacccccattatcggactgatagtggtcctatatgacaaactccacaaagggccaggcaattcgaacgatcaatcccactacgatgccatttatccgggataccgcccgggtaaaaacgagtgatggtgaaataacaggaaaagggggctgtgtcaaaactaaaatgactactcctcaaagttacagattataactataatatttaaaagggtcgtatcaaactctgtattgagtaatgatacggccctttctttagtctttcaagatgctcaaatttcaaattataagttcatattttcaaaaaatgagttttgacacaccttctcttttttattgtcttttccactgccatcgtctcggtttaccttagccggaaaaacgaaaggctatggcaaaactgacacccgattatatccaattcgtcttatcgcttagcactgatcaggcacaacaggaaatccacaaactcgaaaaagcgtcatccgagctgaagagcgaaaacaaggaactgcgcaaatcgatggccgaactcaccgcaaccggacggcgcaacagtgacgaatatcgcaacctcgaagaacagtacaagcgtaacaaccgtgccatcgcggagaacaccgccaagaccaacgaactgctccgctctatcaatatccagaacaaatcctacaaacagctctcgcaagaggcgaaacgcttgcaacgcgaactggataacaccgtcaaggcgttggagccggaacggtacgctgaactctctgatcagctagaggacgtaaaaaaacggatgaatgaactaaggggaacatcaacaaacctcaaagactccttcttttctcttaataaaataaaaacaaccctggccggagctttcgcccaagtaggctacgccgtcacacagtcgatcggcgaagccatcggaaaggtcaaagagtttgcccgtgaaagcataaatctggcggtgagtgccgatggcgtgacacacgctttcgagcagctgggacgtagcgatctcctggcaagtctcagggaacagaccaaggggacagtatccgacctacagctaatgaccgcactggtcaaggcgcgcgacttccgcatccccttggatgaaatgggtaaattcctagcctttgcccaactgaaggcacagcagaccgggcagagcatcgactatatggtcgattccatcgttaccggtctaggtcgccaaagcctcctgatactggacaacctcgggctgagtgccgctgaaatcaaagagaagatcgccgaaacgggcgacttcatgcaaggtgtgggtgtcatcgtggagaagcagctgcaacaagccggaatgtacatcagcgaagccgacaaagtagctgccgccgatgtccggatgcaaaacgccaagttgaaactgggtaaggcgttgtcgtggctgggcgatctccagctgaagttcaagaacagcatggcagagctgatcaactccactctctccaccgccaacgataaatacgaagaacaaaaagccaaggtcatagcccttgccaccgagaccgaaccgctggtcgaccgctacgaggaactacgctcgaagatcagcctgaccgccaccgagcaggacgaactgaacggcatcatcgcccggatcgcgcagaccatccccagcgccgtttcacagatcggggcctatgggaaagcccttgacatcaacagtgagcaggcacgcaagttcatcgagacacagaagcagctcatgctctacgacaatcgcaaggccatcgccgaggctgaaaagaacatccgggaataccaaaagaaattcgcccgtgtcaactccgtcatccagaaccaagggcgcagcatctacactcctacttccactttcggtacggggcagtacatttgggacaattctcccgaaaccctcgaacgcgccaccgcagaggcctctcagtaccgggcactgatcgaccgtgagaacgaccgtctgaaggaactgcggggcgagaacctcgaatcgctgatcgagaaccagcagaagcagcgtgaagcccgcgaggagttcctccggatgaaccgcgcgcagctcgaagcctggctcaaggatgagaagaacgcccaaagcgaataccgcgacatggcgcaatcgttcctcgccaccaaggccaccccaacaccggatagtggcgataaatccaagaagaaaggcaagaaatcatcaaaaaaatttgatgttaccgaacggtatccccaatacaaagggacgttcaccaccatccaggacgatatagaaatcgtctccaccgaattattcaatatgtaccaggagcaagaccgtttggccgactatgtctgcaggcaagtcatcggaagcagctccctgatcgccgacctgttcgccaacgcttcagaaaagagcatgagcgagatacaggcgatcatcgacaaaaccgaacagctcttctactatctgcgcggcggctccgggataacacgcgggcaaatcctttcccttggcatcagcgaaaagcaattggagctactggaaaaatcccccgaagaagtcaaggcgttaggagacgcgctgaagaagatacggggtgaactgggcagccgttcccctttcctcttgctggaagaccagttgggcaaggcaatagaaaaactccgcagcggtgacctggcaggtggaatcgaaggtatcgggaacgccgtccaagattttgctcccgccttgacagaatttggcgaaagcatcggtgccctctttggcaacgatgatgtatccaacaagataaaaggcataaccgatgctttcggcggtatgggccaaaccgcagcaggcgtagggcgcattatggccggtgatattgcaggcggagcaatgtcagcagcaggcggtatctctaaacttgtaggggccatctccagcttgttcggtgccgactattccgaatacaacgagatggtcgaaaagtacgaagaactgctcggtatttgggacgaactgctggacgccaaaagggcttacatacaggaaagctacggcgcggaagccatcaaagccggtgaagaggcattgaacataacaaagaaccaactggaagtggaaaagaagctggcggaaatacgcctgtcgtccggtaaatccatcggcagccactcgctttggtatcgcatgtggaaaggctcctacaagtgggaaggccaaaactggcgcgacgtggccggagaggtcgaaaacggactagcgaacgcaggcctgggtaacgtatcctttacgcagatggaaagttttctccagatgtcatccgagcagctccagtggatcaaggagaactacgccggattatggtctgttatggacggggaattccgggagcacctggagaatatcatcgagtttggcaacacagagcaggagatcctggaagccgtcaaggcacaaatgaccggcatcacattcgaagagttcgaaaattcctatatagacatgttactggaccttgattcaagtaacgaggacttcgccaacgacttcgaaaagaaactgcaacaagccatcctgcgatcggtcatcgcctccaaatacaaaaatgaaatcaagaagctctacgacacttgggcgggctacggggaagacgggtacacgccgaacgaagtggaccagctgaaggaaatgcaacagaacctgacggaatccatgttacaggaacgggagcagctggcatccctgtttggctggagcgcggatgccaacggaaacgacagcagcacccagacagccagccggggtagcttcgagagcatgcgccaggaaaccggcgaagaactgaacgggcggtttacggcagtacagcaatccgctgtaaacttggaaaggctggttgaatcgttacttcaggaaaacggggctaacctagagtgcatcaccgaaatacgcgacatactctacgaaagcaacggttacctcggcaagattgagacctacgcccggtcgctcagctccatgagggaatcactggacagcatcaaagaaaacatcaaaaacatataaacaatgatcaaaaacgctacaatcaacggaaacccgctatcggtttggggtgccgccctgatgtcaggcacagtcgaagtgttactcacccccgcaccggtgaaagaatatatcaaaggtgaaagccgcctggagcatggatcgcgtattgtgatggcaaacgtcaaaaccgcatcgcgcgaagtttccctaccgttcctgatcgagggaggcggaagggaggatttccttcataaatacatgtcctttgtcgacgaactgtataaaggtaatattgcactgcatataccagagttggacaaaacgttcagtctggcttacctctcgtgtggaaaatacgggagctacggcgattgccgggcaaaactggtagtcaagttcttggaggcaatcccggttgaaaacaaggaaaagaaatgatcgaaatcaaagacatatcaggtagaacaaaactgtacacccttccggggaaagaatcggctagacggttttcgctgatgacagaagacagcgttcggctcgtattcacgctggctgaacccgccacgctctccatcggtgaccatatcgaggtggacggcaccccctattacctgactgaaaccgcctatcccaagtacaacccgacgacaggcggatatgattacgacatccgtttcgattcccactactacaggtggaagaaccatatcctgttttatgaccggcagggaaatcgtgaagtctcttggagccttacacgctcaccggaggcacatctgggtataatcgtttcaaacctgcgttccttgggattcacctataacgggaaggaatacacagccatcgtgggcagcgaggtcaaggcagaagccaagccagtcacttacgacagcaccaatatcatcgacgcacttaccaagatcgccgaggcgtgggagtgcgaatggtgggttgtgggagaaaacatctacctgggcagactggaactgcccggagaacccgtgacgctggagataggcaaggaagccagcacgatgagccggacgaaaagtcgggatctctatgccacccgcctgtacgtgttcggcggcgagcgcaacatccccgacgactaccgcgggggagaagccggaacagtggtggaagggatcgtgaagaaacgcttgatgctaccggaagggacaccctacatcgacgtggtagaagggcaaaaagaaggcgaagtggtggaaacggtggtcgtgctggacgacatctatccacggattaccggtgtaatgtcctgcgtaacggaaaaggagattgaagaaaaagacgaaggaacaagcgaaacaacccggttcacggtataccgcttcaaagacgcggggcttccgttctccgagaaatacatcctgccgggcgaagagctgaagatcgtgtttgagagtggcacgctgtcgggcatggagttcactgtaacattcaacccggacgggctgaacgaaaataaccccgaagcacaagtattcgagatcgtccgcaaccaggactacgggcagtggctgcccgaagaaccgctcgtgccgcacgagggcgaccgctacgtgctgagcggtttcgacacctcatatgtcagcgacgaactggtgccaaaagccgaacaggaactcctgacccgtgcactggagctgaaggaaaaggcgacagccgacccttccacctataccgtgcaggtcgattcataccaggcttccggctacgatgaacgcaacggactgttgaaccctgaaaaggcgatagaccttcaacccggacaacgggtggagctggtcaacccaggctacttcaaagcggggcgcacctcgcgggtgatcggctacgaaaagaagctcgatatcccttacgactccccctcctacaccattggcgaaactgctgcctattcccgcctcggggaactggagcagaggatcgacaatatccaatataaaggcaatacctacgtcaaccaaggcagtaacagtagtggcttcggcgcgtatatcataaagaaagacgacacgaccgccgccagcgatgaaaacgttttctcctccctgcgcacgctgaaggagatcaacaaacagaagctcgatatcgacgggatgtacctgcgcaaggacataaacgacacggcgcacggcgatatcacattcgaccgtactatcggcagtaccatatacattaacggtatcgaaggcggtaaaggttggaagattacatctgatggtgatatcgaaagtgaatcggccgtgatccgttcggatgcggttatagggagttccataggcagccgtgattttgcctccggcatgttcggttatggctggcgtatcgattcgcctacagcttccggcacggtggacaactggacggtgcggaaaacattcaaagtctacgagctggtttattcccaggtgttgggcctgaacggttcccatatcgtggcggactttaacaagataaagacagtcactccgctcggaacacaccgttatcgctgcgagatggacgacatgggcggcgagatgttcatgaatcttcgagatggtgacctggtccgtatccaacagcgggacggaaggggtggaatccgttatctgtttgccgaagtggaaaacgtgacatcggagaggttcgaccttaaagtggtcgaaggcagtgacgagccaaaagccggcgacacggcattccgtatgggtaatcttagagacgggaatcgccaggggcttatctatttgacttcttccgacgattatgcgccttacatagatgtgcttgatgaagtgagcagcccgcaactcacagccgataatacgaaggtccgcatcgggaatctgggggggctgacggtcaacggacgtacccttacagggcatggcatctatatcaacggcggtatctttcagcatagcacctattacctggaagacggaagtaccatcgagcagacgttcgaagtgatggaaggcaggctccgcagtgagatagaaggtgtacgaagtgacatctccggggaaaagggaaatatcctccggaatccctcgtttgcatccgacacctattattgggatgcgaagagcctggtgcattacattccggtcaagggtggatggctttggctgccgtcctctttctatgtggacaaagagacgtatgcgggtatgtaccgtgacgggaaccgccgtgtcctgagaatcctaaacagcagtgtcagccaggcaaacgacctgatggatatcccggtgcattcccatccgagcgagaatggaaaatatacctattctttctcctttcattaccgggtactaagggcaggtacattgcgtgccggggtgtccggatcggaacttttcaaagaagagagtttgtcgccttcggatggttatagcctttactaccataccggtatgtgggatgagaaaggcgattttggcattgctttcaccggcgagatactgatatacggtgtgacgctccgtagcgatagtgcggctgacgcattcctctaccttgccaccggcatagagcagagcgaggagcggatcaagctatgggccacgaaacagatcaaggattccgaaggagtgatcacgagccgctatgacagccagcttagtatcatggcggacgatatcaatgcccgtgtgacctattcagaataccaaaacgggactaacagtcttaaacaacaactgcaaagccagatcgacatccaggcggatagtattgaggcggtaacgactgacgtgaacaatttggaccgatatgtaaagacctctggtttcatcaccaagtcgggattcgcttcgctttttgcggaagaagttaacgatagggggctggtgactcaggcttatgtttccacatatgtaggcaaacagttaagcacggtcgcaataggtgcagaccagatacatttggaaggttatactactgttaatagtggcttcagcatagacggatctggaaatatgactgccaaaaacgggacgtttagcgggacaattacggcgaacggtggccagattggccttttcaagataataaataatcgtcttgtatgggaaggtttggattatttcggggataaatcccgcactataaaaatgggttatggtaataataatgacggattggttgatatcgcatttggagcgtccacacaaggccgttttggagtgaaagcgataggacgtgctcccggttcagcagcgatttatggttctagcaaacaatctccttcttacccatccggagacactgtttgggctgcttggtttgatggctatatctattcagatggatatttcaccaagagtccgaaagggaatgtgagagggggcttaaaaggggcttatagaatagataacagcgatacttggtttgtatttgacaatggcatagccgttgcttgtacaaagccacgttcggttgattttaatacagataatttttaatctcaaaaaaatagaaatttatgaaactgaatttgcatgtgccgttcaaagcttggaacggggaagagataaaagaaagaaaaggcgaggaagaaaaagccaagatgatagatgaaacggtaagcctgcttcttttcagcggggattttatccgtccgtcgtcggatgccgagatggtcgcgaaacagaagcttgcctcctatgaattgtattgcaagatatccaaggcaaaaggcgtagtggagctgacggccgaggaagcagctttggtcaagcaggccgctgcggtgctcaatccggggggatatggacagattgtagaactgatagaaaaaaagtaggcatatggaaacacaggtattgacatcaaacggaacagtccaatccggtaatgtgtcggccgaatatatggcaacccatgacctctcggaaaacaaacattcgtttgtctcttacataaagaaggacggcaaacaggtagggtatatgaactactcggaaggaaaacgtctgaccttgtcgctttctgatccggatgcattgacgggtgaagaacaaaaaagtattgttgctattctgatagagaagctccaggaaaagaagcaaatgacggtacaggtttcggatgcggaatgaactttaaataaaaaatggaacatgtatggcagtaggcgatataattacatcggacggtaagacactcacgatagaagacttacgaaagatcgcggtcgaggtcgaaaagctcatatcgagcaattcgaaggatccgggcgaatgggaggaagtaaagagcctttccggtataacgtcacttcccgtcctgcaatccctgggagcaagttacaagctggtccgcgtagccgttgagatattgaaaggtgtggacggtcatgatgtcgagttccaggttgatgcggaccgaacggccatccagtggcgtaaggtgagtgtttccggtggcgaaccgtccgaatggaagacgttgatacaattgtcctatttgaaaggtgacgcgggcgaaaccccggagtttcgcaaaggtgacaccggtttggagtggaaatataagagcgaggaagatacggcctggcggtcgttaattgccattgatgatcttcgctggcactttacggacttgacgaaagaccagattgcagaactttggcatgaattgccggatgatgtactgaccgagttccaggctccggcactggaagctgccgaggtagccaatgccggggcggaccgggccaatgcggccgccgaggctaccgaacaaacgaacgtggaagtctgtgaacaggaggcggagcgaatcaaggcggaagcagcacgtatagaagcggagatcgaaagggttgccgctgagcaggaacgttccacttccgagattgcccgtaagaattccgagacgaaacggaccgaggcggaagctcttcgcagaagcaatgaatcagagcgacaaaccgccgaaacagaacgcaaggaatcggaaacggtccgtaaggaggctgaaaccatacgcaaaacaagtgagagtgagcgaaatacatctgaaaacttgcgcaaggaagccgaaacagcaaggatagaatctgaatcgtctcgcgttcaggtagaagccagtcgggtaagggcggaacagacaagaacggaaacagaagttgaaaggacgaaggccgagagcaaacgcaaagagtcggaatcagtccgtgtcgaggctgaatcgcttcgtactttatccgaagagcaacgtatcaaggccgaagccgtacgggaagcggctgaaatagtccgtggagtatcagaagaagagcgggaagcggcggaagtggttcgccagaaccaggaggaaattcgtcaaagtcaagaaaccaaacgggaaacaagtacagagatttctattcaaaaagccaatgaggcagctgatcgggccaacactgccgccgaggctgcagaagggatcgtttccggtattcgccctgattggctctcaggaaaggaatcgcccaattatatcaagaacaaaccggagatcccgacgttggaggctatcccggacgaaaatacattgagctatgtcaataccgacggtacaaccatcaattttcgtatcggtgatgatgtgcgtgtagcggaagatggcgaatatgtattctaccggctttatgatcttgccgggggaaaagcctcgtggcaggaatccggcagcggtacagccttgcccggtaatgtttatctgacaggagccaattattacaatgaatcagtacgaacgataaaacaaggatatttaagcaatgagtaagaaaggtgcatttatttatcaacagatcgaactgacgacggctgaatgggccgataacgcaaccgtctaccccacatcagtctggttatttgaacgtttggaaaacggtaaattcaacatgaagctggctgatggcgttcatacgtttgcccagttgccggccgtcatgcaggaggtgaaggtcacggttaaaacgaatgatgccacgacctatatcctgacgatcacgacggctgaaggtaagtttgacaccccgaaccttcggggaaacaatgctccggttccttcgatcgatccggcaacgaagcactggaaaatcggcgacgaagatacgggggtggtagccgaaggacaggacggggaaagctacgacgacacggaaatcaggaacgcgctgacagccttgcagcagcaagtcaacacgctcgtttcgggtgacgcatcgagtgccatcgagtcatttaacgagatcatcgctttccttgccaacgtagaggacacacagacgttgcaagggatcatcgccgggctgaaccagagcatcacaaacgtccagcaggcgattccgacaaggctatcccagttacagaatgacgaccatacggtcaaggacgctgcttatgtccatacggataataattacagcaatgaagagaaaacgaaggtatcggactctttgaggttgaaagagtatgtcgatgtcagtaccttaaagtcacttccttcatcaccgtataacttgcgttttacctattcgagtacatctgtgcaggcgatcaactttgcgaatataggaagcgttcccgagatgcaggagttttatctgtccattaagaacaacaccggatcaacgattaaccaaccgatcccaaacggttcgggctggcaatcggaggaaacaagcgttgaactgccagctggtaaagccacaggggtatcgctgaaaaaagaacatgggataattgtcgtgagagtataatgaaaggaggtgagagatgaagagaagggtgatgatgggaaaaaatgttggtatgcctgatgataatacggtctttctattaaactttgataaagagcctattcacgatatgttgggaaaatctgtctctaaagaaggatcagtaattatcctttctaatggaagattcaagtcctgtggccagtttggaaatggagtattattgttggatcggtcttggtatgctaatcttatatctacagggtattttactattgatttttggatatatcctaatgaaagaaatgaatcattattattcggttgcacccaagcaggagacagtataagacaatgtggagcactatttttatatacttataatggtttgggtataacctttcatgccgataatacatctgaatcctttattcccacgtacacatatccaactttaaaaaaatggtcacatatagcagtggtatgtcataattggaatgttatgatctttatcgatggatatttgaaaggggaaggtcttttgaaaagttctattcttccgagttatagtttaagattaggaggacaaaacaggagagatggtgatcctctatattctataaaatcaaaaatagatgaattcagagtaagtgatatcgcccgttggacatcaaacttcactcctcctactaaaccgtatgtgtaatttaaaaacgaacaatatcatgctatacattcaaaaacaaataaacttttggcctatagaagaagtcttacctgcttcctataagacaggcacaactcttgaagagtttgaagatggcgcttatctcttgcttaacgaagaacaggagaagtatcataacgactatccggaagcttcaccgttggaatgctggtacatggcactgacaccggaaccacagccgacaccggaagaactgctctggcgtgcccgtgatgccaaacggcaggaaatctacgacaaagacatccatcattattatattgatgaacaggacgcatatgtctcgaacaccctgcaagtgaaggataagtgtggccggcaggaagaagtcgaagtaggcggtcatctttacgcctcgaatatcttaacagttgctcttgacgaaatagcggactattcggagcaatgcggcaaggtgacagacagcttgctatcccgtatcgatgccgcccaaacagccgaggaggtcgaagctatcgtggtggaaggctatcctgaaatgatccatacaacaacggcagccttgcaaactaaagcagataaggcaatcgctaaatccccggaagtgcaggcagtgacctttgcccgtacgatgatgaacagcgtgtctctcacagccagccaagcgttggagatgcaggtcttattccccatttggggtgagaaagatgcggagtttggcaaggaagttgaaataggcttccggcttcgagtagtggaaggagaaagcgacactttgtttgaagtgatacaaaagcacaagctgcaagccgattggaaaccgggcatagaaactgcttcactgtataagatcgttgaagctgagcacgcaggcacgcttgatgatcctattccatacgtgcagggtatggcattcgagaaagacaaatattatgaacaatacggtgtgatctatctctgcattctgacaaccgttacaggttatccgaacgacttgaaagacttgcccacaattgtacaggaggtaaagcaatgaaacaggttatgttattaaaagttaaacgggggggggggtaaaatgctctctaaataaagaagttacgacctcttatcgtaagaaaggagggcgtagatgagacggtcgatgatgggacggaagaagttgcagttgttcaccaagaggttctatcctgccgggaattatacctggatcgtacctaaaggatgtagggaggttgatgtgtttcttgtcggaggagggggtgcaggacataatggaagcggtggaggtggcggctatactaaaaccttcaaaaaagatacatccggatggagagacggtgatgctatctctgttgcaccgggtcagtcaattccgataacagttgggaaaggaggaattggagggtattctgaagttgcccccaacggtggatactctcaattcttaaatttaagttatagagctaatggcggaaatggtgcgggtaatggttatccaggcggaagtaatgccggagcatatactggtggcaacggcggaagtggcggagcaggagatgattcagatacggctaaagcgggttctgatggatctaacggaataggcagccgcaatgaaaatggctctctctatccagctggttccctatatggcggaggaaagggtcaaaggcatacaacccgcgattttggcgaacctactgggaaacgaaatgccggaggtggtggttcagacagaaatataaatgggggcatgggtggagaatccgattacgacaaaggatgcggaactggaaatggcaatagaaaaagtggcggttacggtggtggcggttgtggtacttacggtaacggcggtgatggcactgtcctgatccgctattgggcttacgaagaatgatctgccgttgaaaaagatgaaacaagatattaacgactaaaaaataggagataaaatcatgagaaataattgtttacaaatgttaacggggggggtaaacacctcttaactcaagtatctgaccgactttcggcggaaaggaggttggtatgataagatcgatgatgggacggaagaaagtagacaggaatactttgctgttgctacattttgatggatcattgaaagatgaagcctcaggcaagccttatgttggtagtaatatgtcctatgtagtgggaaaattcaagaattgcgtttcgttttcaggaaacgggtatgtaaagataagtggaacgaatgccataaacgagtccctatgtccaaactataccgtcgatttttggattaaactgaaaagtggtgtgagaaacggtataatgtcaaaaggcgatggtggtggaagttacagctttgatataatggaggaatctgacggacgcattttctttggattgcagtatggtggaacccgaggggatgcaatatgctattttacgatgccacgggatcagtgggttcatcttgcgatcgtcaggtcacaatctcgatattggaaagtgtatgtaaatggagtgtatgcgtctggtttcacatcaacgatggtttcagggtactatagttctttaatgatcggaaaatatcgggattatggattgtatctgaacggtatgattgacgagtttcgcatcagtaatattgcccgttggacatcaaacttcactccgcctgcaaggccgtattaataaattagtgacactgtctttgggctgtcacagcagaaagacagcaaatgtatattcagaaaaaattattgataatcgccaaccccaggttgggtattttcttttaaaacaaatggagatataaaatgttcggtggcgaaagaataataaaacagcctccaggctatcacagattggaggctgtaaaaaaagaaaattaggggaccgagggtctccggaaacaaagttaaacaataaagtttgaaaatcatgttattattaattatttctttttgggttattgcagtttatacagcagcagtttgtataaaggcaaaaggtgtaccttactctatcagtgcaacttactacgcaatagaacacaaaggatggtttcgcttcacaatgtgggcttgtcctatggtgttaatgccggtgatattggaggtcagtaagccgggcacggagtttctcgcttacctggcgctggccgggatgatcgttgtcgggtgtttcccggattataaggcagacaagttccaataccggggacacatagctggcgcaacgatggctatactattttctcaaatctgggcagcattaaacttatggcctatgctacttgcctggctactatatgttggctatacggccctaagtattgcaaaggaaaaagaaggcacattctggtataggttttacaggagcaagcctatgttctgggtggaaatagactcgtttttggttatctatttagtttgctgcatacttgaaatttaaaataaatccgcctcccggctatcacagacaggaggcggcaagttgaacagattgctttaatgtggcaatctttaataggttgcaaaagtagtaaataaatagaaaaggaggtgcaatgtgaatgtagaattgaccgatatattaacaataatcgggacattgggaggattcgaggcgataaaatggagcatcaacttctgggttaaccgaaaaactaacgcacgcattgaagatgcccacgccgatgcagaagagttcaaggctttaagggaatacaacgagttcctgcaaaaacaactttcagaaaaagaagagcgctttgtagaacaaaccggaagactccggcaggtacaggacgagctttttgcattgaaagaaagctattcggatgtcaaacttgaacttgccatgaaaagatgtgagagaaagaaatgcggcgatcgtgaaccgcagaatggatattaataataggaggataaggaatgagaaataacaatttaccccggggattgcgcaacaacaacccagggaacatcagaaggaacagcgatgtcttccaaggtgagaagacaagctcagacagagagtttaaacaatttaaatcgatggcatacgggtatagggcaatctttaagatcctctttaactattaccgaaactataagctggatacgatccgtaagatgattacccgttgggccccgccggaggacaacaatcacacggaagcctatatcaaaaccgtttcaggctacgccggaatcccggctgacgatccgattaatattaacaaccgagaacagatgatccgtattgtggccgggatgagccgggtggagaatggccgagatgcggagatgagtgatattattacgggatgggggatgctatgatgaacaaagagacaaaagatgaactgatagggagcttgataggattgctgttattggcattgttgttattgcttacatcttgccgtacacaaatcaagtatgttcctgttgaagcaattaagactgacagcgtgttcttcaactctgtccggatcgatagtgtacttatacatgattcgacctatgtaatccaaagaggcgataccgttaccgaatatcggtacaggtacatctataagtacaaggacagggtagacacgctgtatataaaccggacggattctatccgagtgccatacccggtcgaaatcgaaaagaaattgactgtatggcaacgaacgaaaatcgaagtcggaggctgggcaatggcggctgtcattgtcataatactgatcattgttggccggatggtctacaagctaaagaaataatttgccaaacagcatgcagcccggcggagaaccgggctgctacttttcatcgttttccatagaatacccaatcgattacgcggcggttggcatcgtctaccttttgccgatcgaaatcaatgtagatgtcggtcaccgtatttcctccatgccccaaggcggcagcaatagtctccttgggtatgtcgagcgaagcggcaacggtcgcccagctgtggcgcgcccagtaggtggtgataccggggaaaagcggcgtgaatatcttctttccccctctcccaacgcgcctcatatcgccaatacgttgcagattgtcgttaagccgtttggcgtaatccttgtaattgccgtagcggtccatgatatcgagcaggtagtccttgcccggatagcggttgatgatctccatagcttccggctccaccttgacagaatagaggcggttggtcttagcccggtagtattccacccgcccgtcaattatcactttcaggtggcacaggtcgatcacgttaatcccgataagcaggaatgtcagtttgaacatatcccggtatttctccaaatgttcttctaccggggtatcaaacagcagccgtagccgttctaccgacagcgagcgtttcggggtagcaaccgcgcgtatcttgaatctacgaaacgggtagaagcctgtaatatcatcgtcgatggcatcattaaacaccgcccgtatgttccggaaatggatgttacgagcgttctgcgagggcgaagtctgttgcaggaacaagtcgaaacgcgccagccactccttgttgatttcctcaaacgcacgctccctaagtcccttgtcgaaagccgccatgcgtttataagtctgcatgtaaatacgcttggtgctctccttcttgaccgatgcaaaacgtaagaaacgatctgagaagccattccagacgcttttttcttcttcgagggtttccagttcgaaaaggacacgctttcggatctccgttatactcctgtattgcagaaagccactcctttccagtctgaacagcaagtcgtctatttcctgtttacgggctcttatgtaattattcaagaaaagtttgtcgggatgggcaatgattttacacgcctccctatcccattgcgtcggtaaaatacgaatacgaagaaatattaacgcggtacgccctttttttgtcaacgccagcttcagcggggcttccttgcccggatatacagcccggagatcgagatagaattttgttgttaccatatctgcttaaaattttttgcaggtattttgcaggaaatttcatccaaaatgtgcaaaacacccgttttttttaagctgatttcatgcctttacaatagaaaaggagctaaactaaaatcataactgacttacatttaactcctttactcagtcggggtgagaagattcgaacttccgaccacacgccccccagacgcgtactctaaccgggctgagctacaccccgtttttgttttacggctgcaaaggtaactatttttcgttatactccaaagctttcacgataaaaatccagggattcgagaattttctccttactcacctgctgatttatctgaacatcaccgacttgagaaagcaaggtgaagttgatgattcccgcttcattcttcttatcgtgcgtcatcaactcgtataaggtatcataatccttgcaatcgaacacgaaagccggataatactccttcaaataatagacgacctgactcagtttctccatcgggaaaccacatactttatgagacaggtacaattcgctgacaataccggcggcaacagcatggccgtgcagcaaaggacggtccttcttaaaggacaaactttcgtaggcatgaccgatcgtatggccgaagttcagcgccttacggatgccgtgctctttcgggtcttcctccacgatacgttcctttacggctacggattgggcgaccatcctgttcagaaaagcataatcgatcttcgcgtcgaggtcgaacagcaggacggaagcgtaaatatccatcgaactgataagcgcatgcttgatcatttcggcatagccggaaagcaggttgtcgcggtcgagcgtacgcaagaactcgcaatcgataaagacacattcgggtggataaaaagagccgacctcgttcttcaaaccgttgaagttaatcccggtctttccccccacggccgcatcgacagaagccatcagggtagtcgggatattgacggtccgcagtccgcgtttgaaagtcgcaccggcgaagcctcccatatcggtaatcataccgccgcccagattgaccaaaagcgaatttcgggaagccccttcgttcgagagacgcgaccagatataggcgacctgttcgatgtctttatgagtatcacccgcctgcacggtaatgaccggggtatcctgcaaagctgggatatcttttatcagcggataacacttttcttgcgtgttcgtatcggtcaggataaagagtttatcataactcatggaagcaaagaatgcctgcaaatcggctttgagatccttgctgattactactttttgagcggccataatgtccttttttattataatcgttgcgacaaaggtattatatgttatccgattatcaaaacagggaaaagaaaatgaaggtgtgtcgtaatacccgatgcgccttcttttttttcgttgactataaaaatcggctcatttttttaagctgcgatattttgaggatttctttgatttatgtgttcgcagcatctaaatatagctactgtaagctcataaaacagtccagtcagccaatccataccttctttagccatttttgcacatatcttttttatattgaaggcaatggcaaagaaggaaaagtccatgaagaccttgtcctttccaaaatggcggaaacgtttgtagttcatattgtttttcatttgtccgaacacggcttccggttctatgcatctctgtcctctgtgtttcagcccttcctcggagcagagctgctctttggctttttgcctgtattttctgagcctgtgattcagttctatcgtcctgtttccttttgctttaaaacaacggcatcttagcggacagccttcacatctgacggctctgtacctggcattttcgctgacatatccggatgcggttttcacatgtctagtacctatcctccgcatcctttgtcccatagggcagatgcaaaagtcatgttcttcattgtagtagaagttttctgccttgaacggatccggtttgaatctcggccgctgctccatgtggaaatagttatatttgacgtaagcttccatgccgttctctgacatgaagcggtagttctcctcggaaccatagccggaatcggcaaccaccgtatgagccatccggtcatacctgtttgaaaaagattgcaggaaagggatcatggtcagtgtatccgtagggttcgggaagagtgcaaaatcggtgatgaactggttctcggtgccgatctgaaggttgtaaccgggcttcgtctgcccgttacgcatggcatcctccttcattctcatgaaagttgcgtccttgtccgtcttggaataggaattcctctcttgcagcgtgtccagatgactgtcgtattcctggagtttgtccctatgttcttccagctccttcagctgtttgcgtctctttttcagctcagtcttttcctccttggtggaaggctcgggaacctgttccagcacatgacgtaattctcccgccatttcggtcagcatggccggagtgaactcaacctcctcattactttccgaagacttttcttgggcgatgacatcgtctatctgccctagcaggacatgtatcttcttcatcaggcgctctcggttccgctcaaccgtttttcgccaaacgaaagtatacttgttggctttggattcaatctttgtcccgtcaatgtattccacgttcaggctgatgaagcctttggaagagagaaggagtacggtttgggtaaacacctcgttgatttccttcttcacccgattgcggaaacggttgatggtaatgaaatccggtttctcatatccggcaagccagatataatgaatgtcacgatgaaggagcttttcgattttccggcaggagtagacgttgttcatgtaggcatacagaatgaccttgagcatcatcttgggatggtaagggctgcggccgcattccttatatagcttcctgaaactttcaagattcaggccctcaaccagggcgtcaaccatgcgcaccggatcgttatctgcaatatcctcatctattctttgaggaaaaagcactgtttggttgggattgtaaggacgaaaatgtatctttgccatagtataaattcttatgcctaaagatacaaaatcttcaggttataacaaagccccagcttgtgaaagtcggggctttgggcataaaaaagaaggtgagaattttgacacaccttcacaaaagttttccctgcatgaaactatcatttcctgcaggggaaacgtctctttcttcttatttcagaccggctgcgtccaagatatgttcgatggcttcacccagtccggctacattcttacctccggctgttgcaaaatgaggctgaccgcctccgccaccttgtatcagttttgccgcttctttcaccagtttgccggcattcaagccttcagccaccaacggctcgctcagcataaccatcaacgcgcatttctcaccgtctttgattccagccacgaagaaaaccttttcctccgtattgctttcacccttgatctggaaagccagatccttgatggcatccacgctggcttcgccacggaaagcgatcactttgacaccattgcgctcaacggcttttgcgatcagttctttcttgagcaactgcactttctctttcacgtagtcgcttacctgcttcttcagttcggcattctcttcgatggccttcttgatggtttgagacagattcggcacattgttgaacatcgcacgcagttcacgtagggaatcctgcaacatgaaggtgtagttttcagccgcttcggccgttaccgcttcgatacggcgcacgcctgccgcgatggagctttcgccgaccacacgcagggaaccgatcatgccggttgcagggatatgcgtaccaccgcacaattcgatagagttgccatatttgaccacacggacttcatcgccatacttttcaccgaacagagccatagcgcccaatgctttcgcttcggcaatcggcatattgcgatgctcttccagcggatagttggcacggatcttttcgctcaccagcttttccaccttacgaatttcttcgtccgtcaccttctggaagtgggagaagtcgaagcgcaaagagtcgggagatacataagaacctttctgttcgacatgtgttcccagcacctcacgcaacgcctcatgcagcaggtgagtggcagagtggttacattcgcactggatacgtttcttctcgttgatcttggcagtaaaagtcgccgtcacatccttcggcaatttagtgaccagatgtacaggcaagttgttttcgcgtttcgtgtcgatcacgtcgatcgtctcgtcgtcagcaatcaaccaaccggtgtcgccgacctgtccacccatctccgcgtagaacggagtctggtccagaacgatctgatataagaccttgttcttctgcttaatctggcggtaacgcagaatttcggcatcgcattcgaacaagtcgtagcctacgaaattgcatccgccctctttcagcaccacccagtcgccggtttcgatggcggcagcgttacgggcacggtccttctgcttctgcatctcgacgttgaactcgtcgatattggcttccataccgttctcacgcaggatcaactcggtcaaatccaacgggaatccgtatgtgtcatataatgtaaaggcatctacgccgctgatcacgttctttccggcagcctttgtttcttccatcttcttatccagcaaacggataccggtttccagcgtacgcaggaaagattcttcctcttccttgatcaccttctcgatcaacgtcttctgcgcgatcagttcgggataggcgtctcccattgtttcgatcaatacgggcaacagcttatacatgaaggactctttgcgatccaggaacgtatagccgtaacggacggcacgacgcaggattcgacggatgacataaccggcctttgcattggaaggcaactgcccgtccgtaatcgcgaaagcgatcgtacggatatggtcggcgattacacgcatggccacgtcctgttgtttgtccttgccataagcagtacccgccatatcggcaatcactttgatgatcggctggaatacgtccgtatcgtagttggatgtcttaccctgtaaagccatgcagagacgttcgaatcccataccggtatcgatcacacgggcaggcagcggttcgagcgagccgtcggcctttcggttgtactgcatgaacaccaggttccagatttcgatcacctgcggatggtctttgttcaccatgtcctggccggggatagcggcacgttcttcttccggacggaggtcgatatggatttcagaacaaggaccgcaaggccccgtatcacccatttcccaaaagttatcgtgtttgttgccattaatgatatgagctttcggcaggaacttctcccagtaaccggcagcctcgtcatcacgcgaaaggccttcggcaggacttccttcgaacacggtggcatacaaacggtcgggattcagtttcaacacttcgaccaggtattcccatgcccagttgatcgcctcctgtttgaaatagtcgccgaacgaccagtttcccaacatttcgaacatggtgtggtgatacgtatcgtgtccgacctcttccaggtcgttatgctttccactcacacgaagacacttttgtgaatccgcgacacgtggatatttacggggtacgttccccaggattatatctttgaactggttcatacctgcattggtaaacatcaatgtagggtcgcccttcaccaccatcggagcagaaggcacaatctggtgctgcttggaagcgaagaagtctttaaatgattcacggatttcttttgctgtcaacataatctattctatatagtctcgttaatattctgaaaaacaatttgcaaaagtacagcaaattattatttttgcacgtatccaagcaagaaaatatttgatgaaactatttaaaagcagaaaaacatattacttatataaccccaacacgctcagttacgagcgcgtttacccctccgccaaagaccgttttttcggtgtgctccgccacctgagcatcggtatcgtgatcggcgtaggcattttctttatcttttcgcgcacgttcgactcgccggtcgaatcgcttttaaagaaggagaacaagctgttgcagacacaatacgaagtgctttcgttgcgcctgaacaatgcgctggaagtcttggatgacatacagcaacgcgacgagaacttataccgggcgatcttccaggctgaatcgatccccgaatccgtccgcaagtccggtttcggcgggaccaaccggtatgaacacctgatgaacctgtccaaccccgaactggtcgtctcgaccacccggaagatggacatgctgagcaaacagctctatgtccaatccaactcgctggaggagctgatcacattgggcaagaaccaggaagaacgaagcaaatgtattcccgccatacagccgattgccaataaggacctgaaacgtacggcatccggctacggtgtgcgtatcgacccgatctaccgtactccccgcttccactcaggcatggacttttccgccaaagtgggcacggaagtctatgcaaccggcgacggagtcgttacctttgctgcctggaaacagggatatggaaactgcctgatgatcaatcacgggcacggattccagacgctttacggccacctgagcaagttccgggcgcgtgtcggacagaaagtaaagcgcggagaagtgatcggagaagtgggaaatacagggaaatccaccggcccgcaccttcactacgaggtgatcgtccgcggcaaatacgacaacccctccaagtactactacatggacctgactccggaagaatacgaccgtatgatacagattgccgaaaatcacggccaggtaatggattaaacattgtttaatacgatggcattaaataaagataaaaatctaaagctctatttctccatcagcgaggtggcgcagatgttcgacgtcaacgagtctaccctgcgcttctgggagaaggaattcgaccaaatacgtccacgcaagacaggcaaaggaacccgctcctatcggcaggaagacatcgacgcaatacgcctggtctatcacttggtgaaagaaagagggatgacactggcgggcgcccggcaaaagctgaaagagaacccggagacaacgatacgccacgaagagatcgtaaacaggttgaaacagatcaaggaagaattgctcgccatgaaggaagcattcgaagcgttggaagcttccaaatagcccttacaccataaaaacgactttaaagaattagcttgttacgccggaaaatcgtaccttcgcagcaatttaataaaaacaagaaacatggaaattacgggaagaatcatcgccgtactgccggttcaaggcggtatcagcaaaaacggaaacgagtggaaaaaacaggaatatgtcctggaaacacatgaccaataccctaagaaagtatgcttccagattttcggtgcagaccgcatcgatcaggcagccatacagcccggagaagaacttacagtattttttgacatagacagccgtgaatatcagggacgttggttcacaaatatcaatgcatggaaagtggaacgcccgatggccgccgctccccagtcggcaccgggagccatgactcctgaaaacgtagtgccggcatccgcacctgcagcatctgctgttcctgatttcggtccggccaatccgattgacgatctgccattctaataaacaaaaagatcctatccttttgcgcaaaaggataggatcttttctatcgaaagctataccttttagggcaaaaggatatggctttttcgacttagtccgctacacgagccacagactggatattctttatcttggaaaggactacgcacatccgctggatatcctccacatcgtgtactttcatcttcacctttccttcgaacactccgtctttcgcctcaatcagcaggcggatgatattgacattgaagtcatcggatatcgtgcgggtgatcgtgttcaacacgccaatcgagtcgatacccttaatctcgagtgtcgcctcgaacgaggaatgatggctgctccattccgtattcaggatgcgttcgccaaagctgcttttcaggcgcatggcgatcggacaggaacgtttgtggactaccacgttgccgtcatcattgataaagcccaacgactcgtcgccgggaatcggtttacagcaatcggcaatgacgtaattgcgttcgaaagcttcctccttcaggatataaggcttcttcttgtcatatttcggtttttctttcggttgttcttcttcctctttcttcccggtagtcgctttcgttgctacccggagcgcctgtttgacgtacttaaagagaacattgtcagttttctctttcagcaatttgtggatattttccggcaggatcacatcccctttctctactgcatagtagaattcttcgcgtttagagaaaccgaaatacatacatagtttgtcgatattggatgtatttgcctccaaattattgcgtttgaaagcatcgatcaccttaatttctccttcttttgctgcctctttacgaatccttttcaggtaagcgtcaatcctggcacgtgcccttgctgtcgtgacgaaattcaaccactccggttgcgggttctgcgaacgggaggtcaggatttctacctggtcgccacttgccaactgatggctgagcggaaccaaacgatggttgactttcgcaccgatacacttgttcccgatatccgagtgaagggcatatccgaagtccagggcagtagccccctggggcaacgtcttgatgtcgcctttcggggtaaagacgaatatctcggaggtaaagagattcagcttgatcgtatcaagaaagtccaaagcgttcgggtccgggctttccagtatctcggtaatggtctgcaaccatttgtcgagctccgtatcttcttctatattatgctccttatacttccaatgggcggcaaagcctttctcggcaatctcgtccatacggcggctgcggatctgtatttccacccattgcccgtcaggtcccatcacggtcaggtgcaacgcctgataaccgttggctttcggacggctcacccaatcgcggatacggtccggtcgaatacggtagatatccgtgatagcggaatagatatcccaacattggttcttctcatccacacccggcagcgggtcgaagatgatacggacggcatatatatcgtagatgtcttcaaaactgacgcctttgctttccatcttgttccagatggaataggcggatttcacacgggcacgcatttcatagttgagccccatctccttcaacttcctgtccaccggcacggcaaaatgctcgaacaaagtgttacgggctgcttccgtagatttcaatttcagattgataaaggcatattcctgcggatgctcatacttgaagctcaggtcttccagctccgtcttgatggtgaaaagccccagacggtgtgccaaaggggcataaaggtaaagcgtctcaccggctatcttgaactgcttcgcgggcaacatggaacccaaagtacgcatgttgtggagacggtcggctatcttgatcaggatcacccggatatcgtcgctcatcgtcagcaacagcttacggaaattctctgcctgtgccgatgcctgttcgccgaagataccgccggatatcttcgtcagaccgtccacgatctgggcgatcttctcgccaaacatgtccttaatatcctcgaccgtatattcggtatcctccaccacgtcgtgcaacaaagccgaacagatggaagtggaacccagtcccatctcgcggcaaacaatacgcgccacggcaatcgggtgcatgatgtaaggctctcccgaacgacgcttcacgccggcatgtgcctgattggcaaaattgaacgccttggttatgcgttccaccttacgccggtgatttgaattaaggtaatcctgcaacagcgcgttaaagccgtcctgaatcatctgctcgtcggccgagagggcgggtttcgcctcttggtcgggctgcatgcctgctgtgtcttttgtatcatttatgtcgctcatatcgaatgcccttccgtttttaacgtgtatgtaggcaaatatatataaatatttgcttatatatccccgaatgcgacagaaaaagtcaaacgaccgggattttcaagacctggcccggccggatatcggcactggtcagcccgttggccctctgcaagtcgtctgtggaaactcccggatacttcttggcaatggaataaagggaatcgccggactgtactttataagtcaaacttttgcctgaaacgcgggctgtctggttgctcttggtaacgacaggggttgctttctgtcccgctttgacagccccgtccttttcggtcttctttgtcttgacggaagcaaatgcgacacctccgttatcgacgtgcagacgcaaacggcgacctttggcaacacggttggaaccgagtccgttccacttacggatatccttcggagtaacgccgtagcggttcgcgatggtatagatattctcaccggaggctaccacatgggtaattttctcaagcgtaagattctttgatccgtcggcagcgttgaccggtatgcagttggccagcaactcctctatacgatgcgtatagaccgaatcctccttgtcaacaaacgcataagtctgcgatgccggaagtttcaatacggaaggttccgtatttcccggaatgatatcgcgtttatattgcgggttgagcgcacgaagctgctcgatgtcgatccccagcacatcggaaacctgttgcaggtgaagcatactgttcaccataaccgtatcggtcgccaacggcagactggtctgcatagggcaaatattatgatcgcaatagtaattcatgatataattggctgcgataaacagcggtacatacgaacgggtttcacgaggcaagtagcggaagatctcccaaaaatcggtctttcccccggaacggcggatcgccttgttcacattgcccggaccacagttataggaagccagcaccaggttccagtcgccatagatggcgtacatatcttcaaaatacttacaggccgcctctgtcgccttctccggatcacgccgttcatccagcaggctgttgatctccaaaccatatatcttgccggtcggaagcatgaattgccataacccgcaagcccccacacgcgaaagggcaaccggattcagggcactttcgacgacagccagatacttcagttccaaaggcaggttatgcttgtcgagcacctgttcgataatggggaaatagaaatccgccatacccaacatatagcgtaccaggtcacgcttgcgtccggcatacaggtcgatgcaatccctcaccacctcgttgtaaggcaaacggatcacactcggcagacgttccaagcgttcttcgtagaccgaatcgggaaaatagacattctccgcatcatcgtgacaatactcatccactttcgaaaaatattgcacatgccaggaatggagcaaactatccacgtttgcatcgagactttcaggtatcaagcccactacgtcagagagcgagtctgccgataatgtcgaatgctgcggttcgccgaatatagggtcttgtgcgcgggagacctgcatcaggctgaacaggcagaatagaataagtaggtttttattcatgatgtcagaacttaaaactgcaattcaatccatacgagcccggcgtatagcgggtcttcggggttacctccggcgaccagtgcagactcaggtccggagaaatgtcaaagtcaaacagttgggcatccacatacgcatcgataatactgatcgcatataccccgaccgtaatgataatgctcaaatccctgtaacggcggaaataatctttccggcgcttcaggttttcctggaactgtgcattcgagacatacgtgctctcctcaccgtttctgacaaagatcgtccaactctcctgccaaggtccctcatacttttgtccatccttctctgccgccaataccttttggtaatcctccatgatatcgaagtaggcagtcgaatagtccttataattcttattgttccaagtgatggcatacatacagcccataaaggccccatataccaacgggagcttccaatacttcctgttatatatctgtcccagacccggcaccaaggcatacagcaacgctttgttaggatcgggtttgaactccttcagcttcaccttcggttggggaagcgattcggcagccgaaagcacagccttcactgtcgaatcggccttggccatttctccgggaaccacagccgttacggccgaatcggaagatatcaccgtatcctgctttgccgttatcgtcctctgcgcatggccggtccataccgaaccgcacaggagggctattatccacaaaattgctttccagtttctcatttcaacttatccaacaagccgatcagtttttccaattcatcttcagatgcaaaggggatcgttattttaccttttcctttttcgttgcataccaattggaccttcgtattaaagaaactggacagatggtccttcagcaagttgaactcctcgggaagtttcggtttccgctgggcaggcttttccttcctggcctgttcgagagccgccgcatccactccgccacgtactatttcttcgacgttacggacagacagtccatccgccaatatctgttcgtaaagagccaactgcacttccgggtcctcgacagggagcagtgcacgtgcgtgccccatatcgatcttcttatccttcagccccacctgtatctcggcagggagcttcaagaggcggagataattggcaatcgtcgcccgcttcttgccgacacgctcgctcagcttttcctgcgtcaggccgtaactgtcgatcaacttctggtaagccagggctatttctatcgagttcaggtcttcgcgctggatattctcgatcagagccatctcgacgacattctcgtctgctgcggttttgatataggcggggatacgttccaagccagccatcagggaagcgcgataccgacgttcgccggagataatcatatatttatccgttcccgtttctttcaacgtaatcggctgaatgacacccaatgaacggatagaaacggccagttcttcaagcgtctcttcttcaaaaacagaacggggttgatccggattgggctgaatcttactcagctctatttcactaatagacgacgaaccgcccgttttcaggtcatccatcgttatcaaagcatccaatccgcggccaagagccgatcttttcattaccataaactttcgaatttatgatttatgatgtatgatgtatgatttgtttgtcttttcaaatcatacatcatacatcataaatctatttgtttttatctatcagctcttgtgcaagctgcatgtgattcaaagctcccttcgactcggcatcgtaaagcagcacgggtttgccgtagctggaagcttcgcttaatttgacattacgctgaataacggtcgtgaaaaccaggtcccggaacggacgtttcacttcttcgtatatctggttggccagacggagacgcgagtcatacatggtcagcaggaagccttcgatttccaaagcgggattcagcttcgatttgataatctttatcgtattcaacagtttactgatcccttccaacgcaaaatactcacattgcacgggtatcatcaccgaatcggctgccgtcaaggcattgaccgtgatcagccccaaagagggagaacagtcgatcaggatataatcgtaccgttctttcagcgggaccagtatttgtttcaatatctgctcccggttctccatgttcagcatttcaatctccgcgcctaccaagtcgatatgcgaggggataatatccagtccctccacttccgtattggtaatcgcacctttcggatcgtcgccgttcaccacacattcgtagatcgactgctccacgctgcggatatccacgcccagtcccgacgaagcgttagcctgcggatccgcatcgaccaccagcacctttttctcaagtgccgccagcgatgcagccagattaatcgttgtggtagtcttacctaccccacctttctgatttgctaaagcgataatctttcccatactttgtctatttattcgggggcaaaactaaacattaaaaacctaacacaaatcagtttatccaaaacaatgcctgttttgttgaaaagtcaccttatctgttgataacttgcaaatataaacagaatattcaataacttgtttcaaatgagcgcgatggtgggtattttttaggaatgataacgaatcctataataaagaaagaaaagagttataatccaagatacgtgtttcattgtgcttacctaacacaagcaaatccttatcgcccgatatgatatagtcggcaggaagcgtatcggctaatgacaacaaatataaatcttttacatctctgataggagataccgccggtttttctatatcaacacaaaaacaatacaaactcatcaattctaatgtatcaagaacatctttctctccaatatactttttcagctttggtctttgaaccacggctttatattcccctatcaattctttgcacacatattccattttcacaaagatacaaacatacactcaaaactctaccatcaaaatacagcagctatctttttatattgttcaacttttcaagcaaggaactattcttatgagccacttgtatattccaccttgcttacacttagattttgttaacaacagtggaacgatacgaagtggctttttccagaaaacggcagattcaggctattatagcaatagaggccggcagattgaagatatcatgtatattattgataaacttggacttacacaattatatttaggtacatatgtacattatataaaaaatggatttcagccttattttagagcgtttttatgtttataagtgattggggataaaaaagatagagactgttttcagaatggctaatgaaaacgtacgttttttttcgccacttttcagctacaaaaatacaactactttttaaacctgcaatcctttctcccaataaattttccttttctatattctttcttatcaattagatagcttaacgcgtacaaaaaaccgactttccgatacgaagccttccgactactcccaaaaaatgactaattaaaacgtacgttttcattagtcattatacaggattttggttaactcttgtaaaacaagaggtttgagtacatagaagaaacaaacagatatactatttattaattaaacattttagaattatgaacaaaaagttttctactcttttagcaggagttgcactgtttggggcaacaagtgcttttgcaggaaacaatgttccctctttaattgaaggaacaaatgatggactgtatcaattgaagactactggtaacctctacttggcagtgaatgcgaagggagaactggttacagttgataatgttacagcagataacgttgcaagcacattgtggtgcacaactgttactgttgaaaatcaaggaaaagctcctatttatgacttcgtaaacaaaggtgctgaagctttattgtctgtaacaatggatgatttcgctaaaaatgcaatgcaaacaaccaagaactcattggttggaggtgaaattgcaggctgggcattctctggaacatatgctaatgctttggaaactaacagaccgttgtattcttatttccaagaagactctgttgtcggcttagttttagagggcactaatgtacgtttgaagaaagctggtggtaaggccgctgatatttcaggagctaaatttgccacattcactttggtagaagctgacggaatcgctttgaatgcaaagcaaatcaacactaaattaggtattcaggatgcagctaacggcgttaaattgacattcaatccggatcgcaacaacacatctttggaaaacccgttcagtgatgtcgctttcatcgctaaagatgctaaggacggatcttttgtttatgtaacaagaaaagctgacaaccagtatctgcatgtcgatacagcatatacaaataaaaacagcgataagttcttggcatttaactacaaaaaggctttgagtacggatttggctgatcaaggtaagttcttgtttacttatttcccgtctcacgactctttggtaatccaagttaagcaggcaactcgcttaagcgcatctgttaaagattggaagacagcgttaactacagcaggaaaccacaaaacgattatcgcaaataataaaactgctaaaaactatgttacaattcaagacctggttaaagcagatgaaattcgtatcgtaactatcgctgacgtaaaagaaacagatatcactttaggcttcaccggttgtgttcaggctggtacagacaaggtttctttggaagacggtctgtatgtaatccagaatgcagaaactaacaaatatctggcatctccgatccatgttgatggtgcagcttcagaatgggtaactgttgataaagcagaacagaacgtaatgcacatgccggcttaccagtgggttgttttgaagactaagacttctgaatatttcttgtctacttctccggtaaatgttacaaaccgtgaatatccgttattgaagaacccggcttataatacaacggacaaggttctgaaaaacggtgcttcttggcagttgactcaggcagaaggttctaaactgtattattgcaaggctttgtcttccgactctttggtcatcacaaagattacagacaaaaacattttgggtgacaaatatttaggatacaaatatttgactgatgatgaattgatgatcacaaactatgcattcaactacttcaacccgtacacaatggacaaatacatcgcacaggttgaaggagacacaactttgaacgcattgcaggaagaagctactttctttgaactggttaagcaaaatgacaacaagactgtagcttacggttacacagtagatgcaacagtacaggcaagaatcgaaggtctggctcagcttgaaagagctacttatcagatcaaagctggtaagaacatgatcgcagtcggcaaagaaaaccgctatgtcttgacagagaacttagctccggctacattctacttcaaagaaaacaacgaaacagaaaagggttgctactatgcatttatcgatgcagacgatgtagagaaagacacgaaaggaaatgttctttctttcaacaacaaattaggtgttgcagaccagagcttgaaagctttacttcaggaacaggttattgaagaagtaagaacttctgctttcagaatcggtttggctgaccaacctctgtatcgtcgtttcaaccacgttgaattggatggagctgtagaaggtaacgaagatgctactaaactgttgaagttcaaagaagcttatgtcggcgattatctgatggatgaaaccaacaagaacttcatgcgtgaagatatggactatttaggcattggagcaaagaatattgccaaagcaggtctgtcattcaatgtccgtccgttcaatatcggaaaatctgctcagcatcagattaagccgcagtatttggtatatgtaagtgaaacagaaaacaaaggaactgaaggaaaaccttgtgacgcaaccaaccacaagcatatgaatgccaatggtgaaccttgcggtccggaagattgtatccatgcaactcctgccgttcctggtttcaaccgttacaaactgttggtaagcttcgctgactctgtagaagccaaggatgttgtcaagggtgaagaactgtatcacttcggtaaataccatcgcgtaggttttgttgatgccgttgaacaggatagcgttctgtatatcttgggtgaacatttcgaaaacgttgcaactaaagacttgagcatggaagacattaagaaagttgtcaaaggcatcaatctgaaggttgctgttacggaagacactcaccacaactatacttggtcattccgttacatcgatccggccaaggctgctaacgaagttgaagaagatcgtgcattcttgatcgaatctaatgttgagccgaaaggtaacaaaggtgaatctatcgctccgacaaatgcagcatggttgaagaaccagaacaactgcttggtattatctgatcctgaagaatctgaattcgaagaagcaaagacaggcggtgacaacgctcttatcttcaacatcgaaaagggttctgctgacgatatggctaccgacaacgaagagatcgccacatctgaagtaacagttatcgctggcgaaggcaacgtaacgatcgctggtgctgccggtaagaaagttgttgtaagcaacatcttaggccaggttgtagctaacacggttatcacttctgacaatgcaacaatcgctgctccggcaggtgtagtagttgtagctgtagaaggtgaagaagctgttaaagctatcatcaagtaatcgagactgaacaatactatcgtaagggtggttattagaccacccttatacaaatgacattttataatcaaataattcttcggttgcgtaccgtaaaacggcaactaacctgcgagaggcgaacaagcaaccggatttaatattaataatactaaagtatattgaaattaaagttcaagttgcctttcccctgcgaaggacgaaggcatacaaaaaaacaagccccggcagtacgaaaactgtcggggcttcgttatttattaaaaacagatgataatcatcatttatattatccatcttataaaaaattcatcatgaaaaaaaacagaagctttcaaaagaagcacaagaaatagcagaattgtacacccgcctggaaatcctcaagtctaaacagatagagggagtcaaaacgacacgttacacgaccgacgccatccgcgcctgccaaggacgcatacgcaaactgctccaaaaggtcggagggatcgaagaaatacagataaaggtagacgacgcacgcacacttgccgagtatttcagcggaatacgctacctccctgaatttgagaaaaacacggaaaaggcagccgggctattcaaggccatgcaggtcatcttcaacttcagcgtcgtggtcaagacgttggccacctattattattcaaaagagaagagagaacggacaaacagttaatttattctaaataaaaatgttaaaaagcaatatgctccgtcaaaaacaaaattcatatacacctaacaaccagtattatatatttcaaaaatccgcttttggcatagttgcctgcacactgggataagcttacctttgtcgcataaacaaaccggcaatccattttgccttaaattaataatatcatggaaaaacaagtacatgtatctttttacgccagcctgttccggacagagtgcaaagtcttaactcttgaagaaatcatcatcctgatccggcgccgccgctggaaaaatgagatcctcgcctaccgcaccgcactagcggaagggcgtgccgaagaagcccggaagctgaagggcggattgccggggttcaccccttcgggggtattcaagggcggacataaggcgagtgcgatcgaaacatacagccaggtcgtcggactggatttcgaccatgtgaaggacctgccggcactgatcctcgccttccgggcgctgagctccacgctggcgatgttcgtcagtcccggcggagaagggctgaaggtcttcgtacgcgtagactgcccggcggaacgccacggcgaagcctatccccttgtcgccgccttcttcgagaaggcaggcggtgtggcaagcgatgccaagtgcaaggacatcagccgttgctgttacgtgggcgacgacggggaggcgtactacaatccggacgcggaagtcttccacatccccgaaaagcagtcggccgaaaagggtgtcgacgcgtttgtcgcacgtttcctcgaccgcatcccgccgctggcaggagcgcgtaaccagacggtctaccgcctcggctgcgaggcaaaccggaggggcttttcgtacaccgaaacagccgcatgctgcacgctgcgcctgcaagcggcagacttcacggctacagagatcgaacaggcgttacattctgcttatcaaggaaatataaacgagcatgcgacctatggcggagcaaaaggacaaattgaccgcgaaatttcccctacagttttcaaaaccggacatcccttagagacggaagaaatcgagacaagcggcgaagtcctgcgcgagcggaccccgctcattcccgacgaggtgtacggatggcttcccgatctgttccgcgaggcggtcgccttctatccccagcaccgcgagcgcgacatggcgctcctcggagcatgcacggtggcaagcgcctgcctccccgaagtgtccggcaaatatcaccgcaaacgggtgttcccccacattttcaccgtcgaggtggctcccgcggccaacggtaaggggtgcatcaacgacatgcgccatctggccgacttgtacgaagaactgatcaagacggaaacaggacaggccgaagccgaatatatgcaagccctggaagagtgggagcagaagaaggcggaggcacaccagaagcaccgctccgtcgtggtaaaggatgctccgaaacctgccgccaaggcctacctcaacatcccgacgcaggtcaccaaagccaagatgcttgtccacttgcgcgacaacggcaacatcggcgggctgatggctgacagcgaaatcgacacgatcctatcggccagcaaacaggactacgggatgtttgacgacttgctccgcaaggcgttccatcacgaaccggtctcttcgtcgcgcaagacggacaacgagatgatccgcatcgactctccacggctcgccctgctgctctccgggacaccgggacagttctcccgcctgatccccgacagcgagagcggactcctgagccgcctgctgctctatacgtgccgcagcgaggcggtctggcaggatgtctcgcccgaaggcgacaagatggatatgccgaagaagctgtcggaactctccgaacaactgatgaacatcgccaagacgcttcgccgacgcccgttgcaggtatgcctgacgctgtcacagtgggcccggctgaaccagtgtttcaagaaatggctgcatgaagcggacctgttcggcgacgaggagtttctcagcgtcatcaaacgccacgggctgatcgccttccgcctctgcatgatcttcaccgccacccgatgcggcaaggagggctacgggatggactcgcagtattgcaccgaagagcatttcaaggctgcgctcgccatcgtcgagacttgcctcgaacacagccgcctgctcctgacgcagttgcgccacaacgaaagcgctcccgaactgtcctgcccccgcaagggacgcatcctgctggagaaattgccggagcgcttcaccctggctgaagcttacaccatcggtgagacggaagggatggacaaaaggctggtcagacgcctcatttataagctgaactctctgttcatcaagagaataagccacggtgagtatcagaaaaacaagcccgtcaccccccaaaaagtgtagggaaaatatcgcggtcaaattgtccttttccctccgcagccgatttcagaaagagaaaaaccctatacctttttcccccaaaagccatagcttccacggaaaaaaggtatagggttttgccctgtggggtatagtttttttttttcaaagccaagcatacttgccggctttccccggctttccccgttttgcccctctcctccccctcttgccacgctgttccgccacattccgcagggacgacaggggcggttgtatctttgttatgtgattaagaaacaaatgttttacctaaaaatcctgatgttatgccagcaaagtacaaattggtcctgcgcaaagacatgcgcaaagatgctgccgaaggttcgaaactgtattacgccagtgccaatacgaccggcacgtgcgacgtgtatgaattgtgcgacctgatctcggcccagtccaccgcctcttcgggcgatgtgaaactgatcctcgacgaattggtcaacgtgatgcgccgcaacctcggcaaaggcgaagttgtcaaagtaggcgagctcggcagcttccagttgcagttcggcagcaccggcacgctgaccgagaaggagttcagccatgcgcttatcaaaagccgccgcatcgtcttccgccccggcaagctgctgaaagatgcgatcaagaactacacgttcgagaagatcgcttccggtgctccggacgagggcagcgcagggggcgaagatgaccgcccgggagaactttgagagttgaaagttgagagttgaaagttgaaagtgatgcttcgcgttcgtacaaataactctcacctttcacctttcaactttcacctttcaactttcacctttcaactttcacctcttcagggttctccgagatgtcccacaatgtaatccttttgtctgggggtgaggtatttcttgcccggatgccagcccgatttttccagttgaccgaccagctcgtcgctgacgcgtatccatttcaacaattgcatggtcgcgctcttctgcgagatattcgggaagtacatcagggccagttcgccccatccccatactttgttttgattcagtgaattttccatcgtttttcttcttgattataatatgtaaatatagtcattatcaatctgaaatacaaataaataccgatatataatggataaaaagatcaactttttacatacttgccgggaggctgccgccgaagcggaaaagctgttcggcatgaacgccaggatcatcctcgcacagggtgcgctcgaaagcggatggggaacctccatgcttgcgacggaacatcataatttcttcggactgatggggtacggcgcttccaacgcgtattggcacggacagcgggccacgttcgagacggcctacggcacgcaccatttcaggcattacgaagccacacacctctctttcctcgacttcgcccgcctgatccgttccgcctatccccgcgcctaccatttcagcttccagcccgaagcctacgccaaggagatcgcctacagcccctacatcagcgaacaaaacggtgacaaccgcgacctctaccgccgcaacatcatcgcgctcgaagcagagatcgggaaacaactggaactgtttcaatggacaatgaacaatggacaattaaatcataaatcataattcataaatcccatcatgaacaaactaaaacaaatccttgaatttatcagagccttgttgggcttcttgttgaacctgaaaaagaagaaaacggatgagaagaatgaaaagccgcctcgcccgataccgggcaagttgccggacgatgtgccggacgatacgccttcggacagcattggcattgtatctggccgccctcgggataatggccctgtgggcggaccgttcggaggtggtgctgggatgtataggagccctcttgacactctcggagtacggacaaacggcacgggacaagcctcctccttcgtgggatgggcgctgattgcatacgcgacggggatgtctttatggggagcctgaacgggtgttagcggatggacactttacggaccgtgtcgccgatgcggacgatgtagtaacccttggcaaggtccaccgtatattcgccggagggttgcttcatcggtatctctttcacccggatgcctaccacgctgtagacttcgagcttgctaccggccggagcattctcgacgacgatcttgttatcataggcgctgatctcaaccgaatccggttctttgtctttggcgacggtcgtccgggacacggtcgtattcgcttgttgtgccatcacctcaagcggacaaccggcccatgcagccagcaacaaaacgaatgtaatcaataccttcatataccaaaccctaagatcgtacaaatgtaggaatattttttgggataatacacaaagttctgtattattaatgatcgatgtccattccatgtttcgacacaccttcctacggcacctctttttcgattaaaccggtatcaccgttccttcatttcccaatatcgtgccggggaataccgcttcggcttcccggtgaagttcggacaggtcttcgtagcgggcggaatagtggccgatgacgaggcgtttcacatgggcatcacgggcgatctccgctgcctggcgtgcggtggaatggaaggtttctttggcacgggcgagatcgcattcggcaaaagtcgcttcatgatagagcaggtccgccccttcgataatcgggatgatcgagcggttataggccgtatcggaacagaacgcataacgcttgggaggagcagccggacgcgtcaggcgggaattgggaacgacctcgccttcgggcgtgacatagtcctgcccctgcttgatatctttcatgcaacggacgggaacctgatagaaatccgtcatctcgcggatgatatgcgcctccttcggtttctcggcaaagagatagccgcaggtgggaatccggtgcttcagcgggatggagtagaccgacagcgaacggtcttccatcaccaacgaatggctgcgggtatcgacaggattgaaacgcacttcgaactccatgccccggcagaacaaatccatcacgggacgcaggtaagtctcgacctccttcggaccgtgcacgaccagctcgccggtgcgtcccagcatgccgagtgtggagatcagtcccggcagaccgaagcagtggtcgccatgcaaatgagagatgaagatatgggcgagacggccgaaacggacgcgcatccgccgcatctgcacttgggtaccttccccacaatcaatcatatacaatttgtctcgtaaatctacgatctgtgatgttgccagatgccgcgtggtaggtaacgccgaaccacatcccaatatgtttatgttaaattctgccataagatccttcggataattcgggtgtaaagataatacaaaagcattggcgtactgtgaaaaataacaaaaaaagcggggagattgttccgagggtcacaggtattccatatatttgtttgctgtccttatggaagctatttagagtcagtagaaaagacttaagatattttcatctaagccttaactaactttttctttttgtttaaaacggttaaatgtagaaacggccaagcgtgagcttcgccgtttcctttgttttatgggaccagcctgtagcatcgtatcaataggcatgcgtgtctttctcctgcatttcctccccgctgatcttccgcagatccaacgcacgccaggcatagaaaatatagcctaagacgaaaggcacgaggatggagacataactcatcacttgcaatgtgaacggactggagcaactgttggcgatcgtcagcgaactttgcaggtcggctaccgaaggataataagccgtattgctccaaccggcacaaagcagcagcgccagcaccgtgagtaccgtgcctgtcccgcagaaccagatgccctttttccatgtccctgacaagatcgtgcgaacgatgccatacaagacaccggccacgcccaccaacagcacggccgatacggcaggcatctcgaccaggttcataaagtatttatagggctgcatatacacctcttttgtctccggatcgacagcaaaaccgtcggcaagtaacagatgcaccaggaagacgaggaagaagacaaggaacagcaccgtctcgatcaccaaatgcttgcggctgcgtttcacgatctcggcatcgtcgatattgttgatgaaataaagcaatgcctggatgcgtgccaggaagaacaccgccagtccgagacatacgttccagaacacgaaagcagcctcaagcccgtgccagggggtcgcccaggtggagatcaccggcatcgcgacatcggtcagctgtcctttgttgacgacaaactcggctccgctaaaaaacgtaccgacagccgtacccaacaggatcgggcccaagatgccgttcaacagcaggaatacctgatacgtctttttgcccaggagattccccttcttcgactggtattcatacgatacggcctgcagaacgaagcaagccagtatcagcatccacacccagtaggctccgccgaaactggtcgaatagaataacgggaaagaggcgaagaacgcacctccgaaagtgaccagggtcgtaaacgtaaactcccatttgcgtccggtcgagttcagcaacatcttttgttgcaattctgttttgccgatcgtgaaaagcaaggactgtccgccttgtacgaaaagcaggaaaaccaatagcgctcctaagagggaaacaaggaaccaccagtaatgctgtaacaatatatatgtactatccataacactcatttcttaattcttaattcataattcttaattcaccgaaggccctttcttgatcgccttcaccataataccgatctccgcgataagcaggacggtaaagagaaacaggaagacgaagaaggtcgtctgtaccgatgaagtggccagcttggacacggatgcgcctgtcggcaggatgtcctggatagcccacggctgacgtcccacttcggccacgatccaccccgcctgcccggcgatgtaggccagaggaatcgtccacaggctcgcccattgcaaccagcgggcatcggcaaacttgttctttttgctccagatcaaagcaacgatgaatagcagaataaaatatccgcccaggagcaccatgacgcggaatgaatagaaagtgaggccgacatgaggaaccaggtcggcaggatctttaatgtacccgtatccgaaataagcgaagttctcgtccaacaggctacgggcttgctccgcagccacctggtctttgtcctttaccgccttgcgataatcagcaagagcttggatggcaatcctccccttctcgatcttctcggcagcagaaagggcaaccgttcctttattggtcgtataaccgccttctatcaggttgacgatgccgggaacgtatgcatccacatcgcgttcggcaaggaaggagagcagtttcggaatcttgatatcgaagatgaaaggatttacattatctttataactcgtcttgtcgggattcagcaggccgatggcaaccagacctgttccgttgcccccttcgtacaagccctccatcgcagccaacttcatcggctgtttctgggcgacctggtaagccgaaccatcacccgtccatacaataagtatggaagcgaccagtccgaaaaccgcaccgaccttgatgctttcgagcgagaactccgtctcccgctttttcaacagataccaactgctgacacccatcacgaagacggctcccacgatccatccggaaagtacggtatggaagaatttgttgatggcgacaggagataaggccaccgcccagaaatcgaacatctcgttgcgcacagtgtccggattaaaatgcatacctaccggatattgcatccacgcattggcgatcaggatccaaagggcggaaagagttgctcctatgatcgtcagccaggtggaagccaagtggaagcgtttgctcaccttgtcccaaccgaaaaacatcacggctataaaagtcgcttccataaagaacgccagaattccttcgatagcaaggggagctccgaagatgtctcctacaaaccaactgtagttagaccagttcgttccgaattcgaattcgaggatcagcccggtggcaacaccgatagcgaagttaataccaaacagtttcatccagaactgcgctgtctttttccagaactcgttacctgttttgtaatagatggtctccatgatggcctgtataacgccgagccccagtgtcaggggcacgaacagccaatgatacatggcagtgagagcgaattgcgctcttgaccagtcaatcaaagatgtgtcaatgcttgcgatcataaattatataatttaaggagtaattgctctattgatcaattcacccgaaacgtgttcttccttagccgaatctccatccaactttcctaaataattaggaaagaaaaacagttttaagataaaaaacatgatgaagagcttgaccaatatgattagccacaacgtcttacccagcttcatttcgcgaaatccttccagataaaaatgatatattcgtatgtatacaggctcccttttcatatcggtatcgtactttaataacaagagattggatgaataagttttctttctatacaaatatagggaaagcgtcaaaatgttttcccctaaaagcatagatattatttatggaaaaatagactttatctataacctctgttaaaaaaaactattttaaagaagaaagccgaaaggaagacttgccgttacttctgcattggctatatttgtgccagtttgtgtttttataagacaagaaatcacatcgaatattataattaagtgctaatctataaaaaattattactatgtcgaacatttcaagaagatcatttcttcaaagaggagccgcagctgctgcagctttctcaatcgttccgggttccatcctgggaaaatctcacggatatgtagctccgactgataagttgaacattgccgctgtcggtatcggcggtatgggacatgccaacattaataatgtaaagaacacagaaaatatcgtagcgctctgcgatgttgactggaagtatgcaaaaggcacttttgaagaacatccgaatgcaaaaaaatattgggattatcgtaagatgtatgacgaaatgggtaaatccatcgatgctgtcatcatcgcaactgccgatcatactcatgccatgatcacggctgatgccatgacattaggcaaacacgtatactgtcaaaaaccgttgacccattcagtatacgaatctcgtttgctgaccaagttggcagcttctactaatgtagcaacccagatgggtaaccaaggttcttcagctgaaggaaccgacttggtttgcgaatggatctggaacggtgaaatcggtgacatcacaaaagtagaatgtgctacagaccgtcctatctggccgcagggtttgaatactccggaaaaagcagacaagattccttctaccctgaactgggatttgtttaccggtccggcagaattgaaaccgttcaacaaaatctaccacccttggaactggcgcggatggtggacatacggtacaggagccttaggcgatatggcctgccacattatgcacactgcatttaaagcattgaaattaggctatcctacaagcgttgaagcctcctctaccctattgctccgtgattgcgcgcctaacgcacagcacgttaaattcattttcccggctcgtgaaaacatgccaaaactggctatgccggaagtagaagtgcactggtatgacggcggtatgatgccgaaccgcccggaaggcttccctgagggtaaagaactgatgggtcctggtggtggtttgacaatcttccacggaacaaaagatacgttggtttgcggttgctacggccaacaaccgttcttgctgtccggtcgtgttcctaacgcaccaaaagtatgccgtcgcgtcaagaaccatgaaatggactgggttcgtgcttgtaaagaaagtgcatctaaccgcgtacagacaaaatcaaacttcttggaagctggtccgttcaacgaaatgatcgtgatgggggtattggcagtccgcctgcaaggtttgcaccgtacattgaaatgggacggcaacaacatgcagttcaccaacatcggcgataacgaaatgatcaagacttgtatcaaggatggtttcacaatcaaggacggacacccgtcatttgcaaaagactggacagatcctgtcaatgcaaaacagtatgctgccgaaatgatcaagcataactatcgtcagggctggaagttgcctgatatgccgagataattagttttaaacaaataaatagaatgaaaaagtcagtattattagcaagtgccgcaattatgatgtgttatttcacatcttgtagcggtggtaaaaaaacagaagaagctgctgctcctgcagaagaggcaaagacagaagctgccgttcctgaatacaaactcatgaacgatctgcctactgtcgacctgtctactttcccgaaagatgccgatggcaaagtcactttgttcgacggtaaatctttcaatggatggagaggctacggccgtacggatgtgcctgctgcctgggaagtggtagacggtacgatccatatcaaaggatccggtgcaggtgaagctggtgctaaagatggtggcgacttggttttcgctcacaaattcaaaaactatgaatttgaattcgaatggaaagtaggtaaaggttcaaactccggcgtactgtatatgatccaggaagtcgaaggacagccttcttatatctctgctcctgaatatcaggtactcgacaatgcaaaccatccggacgccaagttgggtaaagacggcaaccgccagtctgcttccctgtatgacatgatcccggctaagcctcagaactctaaaccgttcggtgaatggaacaaaggcaagatcatgtgctacaaaggtacggtagttcactatcagaacgatgaaccggttgttgaatatcatttgtggacacagcagtggaaggaaatgttggataacagcaaattcagcaaagacaaatggccgttggcttacgaactgttgctgaactgcggtggtgaaaacaaagaaggtttcatcggtttccaggaccacggagacgacgtttggtatcgtaacatcactatcaaagaacttgactaagcagtcgttccttttatcaaaataagaaagccccggtatccaagcgataccggggcttctttcatttgtccgatacagggcggcagggattattttgccatcacctttatgttgctataactgtttccttcgaaattgatacggccgtttttaccgttgttgacatcgagggtgtagttgtttttgttcctttggtcgtcgcggctatcgaaaccgaccgagttttcgtcctggttacgacgttggatattgaagccgccttgaaccttgcaattgccgtatttcatattgttggcaacaacacggaaggaggcgttcacatcgatataaatgttcagattaccgtagcgggcatccacattgaccttatcgaagttgctggcaagatccttgatggtaagcgtgctgtagctcagttcgtcgacggtgatgccctgtttcagctcgtcgatcttgcaatttccgtacttcagttccatatagccgttgtccagcctgtcgatatggatgtcgccgtatttggcttcagtgttcatcttccggacatttccgagactgaggttggagtacttgctgtcgatattcagttgcgagccgttgcggatagaggatttgccgcaataggccaggtccaaagtggcgttgtcgacatcggagatatccatattgccatattgcacgtcgatgctgagaggtcccgtgaaattaccgccattgagattgccgtatttgacatgcagatcgcattttcccttattgttttccggcatgatgatattgccgtacttctgtgtcaggtcgcacgtcagttcagacggcatattgacatagtagttgatggtgaaggattcgttagagcctccattcccgttttgcgacctcaggcttgtaacggccgaaaccgtattgcccatcttttccatccgtatgttgacacggtcgatgatagcctgcgccttttcgtcattacgggctttcgcctcgatcacgacacggatggagacttcgctcttgctccaatgcgtaaccgtaatgtttccgtaacggttgtccacttgcaagatgtcgtttttaccgacattgaagcttttgttgatttcctttttcttgatgctttcctgtttggcagcccaaccggatacgctgcaaaacaaaaccaggagcatcaacagaccggcccgtaaaaagcaggattgtcccttcttggtgtgttgataagctgttttcatgtgttgataaattgttttatgtgttgattaacgtgtttattgtttactattcctgttgaaatcttccatattctccatctgtttcaacatgatgttgagactttccaagctggtactgtaatgcaggttcatggcataaaggccggcattggagcaaggcagagtcggaaggaccgtttcttcgaacatataattgtctgtcaggacacgttttgtctctttcaagagttcctccgttccgggagtccgttgcagtttgtacatcgcctgcatctgtgagatgatatcactcatctgcatattgtagtagagacgaagttcctctatctcctctttcacctcgcaggcatgctggcctgtgaccacctgccttggctgagtaggcaaaggcgtgccacccggcagtttgaagaggaacagcagggcgatgcaagctgccgcggcaaaagcgcaaaggctatataacgtagcccgacttttgcgcggaacagccagcttctgctcgaagcgttcgaagtggccttcaggtaacaggtcgtcttcaaatgcttcccggttcgtgtctatgaaattcttcagtttatccattttctttatttgctgctattatgtccaataatttgcgctttgcccggagatactggctgcgcacgctcgacggccggatcttcaggatagaggcaatctcttccatatcatatccctcaaagaggtagagcgagaggatcacgcgatagccgaccggcagtttcttgcaggcttccttcacttgggcaaccgaataacggatttctccctcatccggcccgtcgtcgtcgggttcggtgtagtcatccgagagctcttcccagtcaggcgtctgtcggcgcacgtaatcaatggctgtatgaacagctatacggtgcatccatgcttcgaaacattgtccatcccgatactggtccaggcgggtgaatattttcaggaaagaatcctgcatcgcctcctccgcctccggcacgttgccgacaatacgcagacaggcgacatacagccgctgtgcaaattgcttgtaaagggcgagctgtgcagtccggttaccacgccggcactcctcgatcagatgtacatttgtttcttccattttcatatatataaacgagggtatccggagaaacgttgcatctttccggcaagaaaaagcaaaaaagatagcacatacctgaaaaggatctatagctttccaagaaaaagcctataatcttttacatcaaaagctatagggtacacaaaaagaaaggcatcatcccgatgcctctctctctgaactaaatgataaaaataaaagttatgtgggaaggttattattcttctgtatctcccgtatcttttgatttgtaatccaactcgacggtattatagtcgttcgaggcgaaagatttatatttgatcttcaacttcaccgtcttgccttccgtactcggcaacttatccagcttgaaagacaccaagccggccgaaggtctgagggacgagtcgatattgccataagcgttatgacggaactccaattcatacggatcggcactgtttgtctgtaccaggttcaggaaatgcttgacattgtcgttgtaacctctttgaatatagaaatcgaacgtgatatatccgtcctcgatccacactccgttctttgaccaaatgctaccgccattcaaggccagcatatccgttccgtaataggaatcattttccgatcccaggtcaggagcgatcggtttggtcagaagggtatccattcttaacaattgaacagactggtcatagccttcagtcttcttctcgtcgttcttatagacaacgaacgcccgaatttctttcaaattctcaggcacatatgagtttgtcgggaacagcgtcgtactgtcgtcgagctgcatatagtaagaattatcactcaatggttttaccgttacaatagcctggacactatctctccaaaattcgctgtaagcgtcgtcatcatccaaacatgaataaaaaactgtagaacctaacaagattccaaccaatagcataaaacttttcaacgtcttcataacatgtatctaatttgtttatttttctttctaaaaaagaagatgataaacactctgcaaatgctgcaaagactgtttacaaaaaatgttaatgcttcagtgattgatagataagctccgctgtacgccgggaagcacccggttttccaagcaggcggatcatctcgtcatagccgtcgagcatgcgtctacggtaggcatgatcgttcaagacacgtcctaactcatcatgtatctggtcatacgaaaatcggacaccgaacagctcctgcaccacttcgcgtccggctatcagattgaccagcgaaatgtatttcgtatggaagaaatggcggaaaataaaacttgccagccggccggccgcgacataatagcagacgacttgcggcacacggaaaagcgatgtctcaagcgtagccgtccccgatgtgaccagcgccgcatcactatgactgaggagaggataggttttgccgaacacgatcttcacatccgcgtcgccgatatattgcctgtaatattccagttccaagccgggagcaccggcaatcacaggctggtggcccggataggcggctgccaccttcagcatggtcggaaggttgtctttgatctcctgacggcggctacctgccaacagcgccaatacggggcgttcgtccaactgttcgtcctcacggaatgtatcaggtccaaccgcctgcttctccctatagcaggcaaccgaatcgaccgaaggattgcccacatagtccaccggatagtcgagattgcggaaaaactccacttcgaaaggcaggatgcagaacatccggtccacgtagcgacggaaatccttgatacgatactgtttccaagcccatatcttaggagagatataatagtagacaggcagtcccaactgcgtctttacatatttggctatcttcaaattgaaccccggataatcgattaggatcaccacatcgggcctgtactgccggatttcctcctggcaggctttcatgttgttcaggatcgtacggagattgagcagtacggggataaagcccatgaaagccatatccctataatgtttcaccagcgtccctccgacagcctgcataagatcgccgcccaggaaacgaaaatccgcttcggcatcctgctccttcagtgctgccatcaggttggaggcatgcagatcaccggaggcttcgcccgctattaaaaaatatttcatattttttcagttgaaagttgaaagttgagagttgagagttgcaaagatcaagagaataaagtaaactggaaccgggataatttcacgttatctatttccaactttcaactttcaactctcaactttcaactgattttttagcacagctaaaaaatcatagtccgtcacatctatcttgcaaggaacaagcgaggcgtagccgctgtcgagcgccaacgtgtcgttgtcggcatggatcggcttggcattctcgaatgcaccggcaagccagaagacaggttcgcccgctgcgttttccgaccgtttgaattcattggtccagcgcccgtccgcctgccggcataccttcatcccttttacgttcgggacattgggaacgttcaggttcagataagtgccatgcggcaatccttcttttatgatccgccgtgcaagcatgcgccctaaacggcagctctcggcaaagtcggcatccgcacgatgatccaagagcgacacgcccatcgaaggaataccgaacacgcatccttcggcagctgcccccatcgtaccggaatactggatgcagatggcatgattgccaccatgattgatcccggaggccaacaggtcaggtttgcgctccaacacctcgttgatggccagtttcacacaatcgaccggagtcccggtacagctataaaccgtcagtcctttttctttccttaccaatgtatacttgatcggcacgagcgaagtgatcgcgcttgccattcccgaacggggcccgtcgggagcgaaaaccacaatgtccccaaggtcccggaggcactcggtgagctcttttatccccttggcttcaacgccgtcatcgtttgtaatcagaataagcggtctatcgttcatcatatcgttatttaattgcacacaaatatagtgaaaaagcgcaaagtaacgcagacttatcctttatagataatgacatctgcgttactctgcgcttgtccgtgtagtttgcgtcctgttaagctctgattaaagaacctgaatgccttcttcacgggctgcttcttctccggaaggagtgatcagcttgtagcccttaccgtgaatgttgatgatttcgattcccggatcatccttcaacagcttgcgaagtttcgtgatatatacatccatgctacgggcattgaagtagttatcgtctacccagatagtcttcagtgcataattacgttccaatatttcatttgcatgtgcacaaaggagactcagaagttcgcattccttagttgtcagcttcgtgaccttgtcgccaatagccagtgtctgtttctgggtatcgaacaagaagtttcctaacttgtagaaaggaatatctttcattttcttgcctttcacgcggcgaaggatcgcttcgatacggagcaagagctcttccatgctgaaaggtttcgtcagataatcatccgcaccgattttgaaaccttccaggatatcttccttcatagtcttggccgtaaggaagataacagggatatcagggttgatagaacggatttcctgagccagcgtgaagccgtcttttttcggcatcatcacgtcaagtacgcaaaggtcatatttgcctttggtgaaacctttgtaaccggcttctccatcggagaagaggtcagtcacataaccttttgcctgcaagtattctcttaatagcatacccaggttttcgtcgtcttcgcaaaagaagatttttagtttttcttccataactaactttttataagaggtaaagtaataataaattttgttcctacatttccggaaccactttcggcacggatcgtacctttatggtcctctactattttacggacgtaagcaagtccgagtccgaaccctttcacgtcgtgtacgtttcctgtcggcacgcggaaaaagcggtcgaatactttcttgaggtattctttcttgatcccgatgccgttgtcctcgatcgatatcaacaacttgccgttctcgttccaggtgcggcacatcagtgtcagcggcacttcgaggcggcgatacttcacggcgttgtccagcaggttgaacagtacgttcgtgatgtgcatctcatccacgtagatatccgaatcttctgcctgcaggtcgatgtcgatcgtgccgtcatacttctcgactttcagggcgaatgtattggcaacgcttgccagcaaatcgttcgcatccacctccttcagtttgagggctgctttctggcgttcgaacagcgacatttgcagcaccttttccaccaggaagcccaatcgtttcgtctcgtcgttgatcaccccggagatatgcttgaacacatcggggctcttcgtgatgtccgagtccttcagcatctgtgcggcaagcgagatggtcgaaaccggtgtcttcagttcgtgcgtcatattgttgataaagtcattcttcatttccgaaagtcgcttctgacggaacacgatataaatggtaaagataaacgttaccaaaagtatcagcgagaagatgattgacggtacgataaatgttacagaacttgaaatataatcacccttcgtcgggaaatacactttcaggtaattctgcttcgaaggaggatcgttggggaacagcacctgttgaatcacgtctgatacaggagggatatccccgttctgatagacgatctttccgtctttgttaataacagcaaagacgaacggcaggttcaatccgttgttaacaaattctgattttaagtaattattcagctttttaaaatctatcctttcttcgatcggcttcagatttgccgtatgcaagatattcaagatcacttcgttaaacaacccgctttggtactgataacgacgtttcagcgtttgctgcaaatcttttgacgtactaacgatgctgttaggtactttattgctgcccagcgaagaaagcggttcaaacttgcgtgtccggatatcgctatgaaactcgatatgttctacagttccatcggcattagtgaactgcatcttgtattttttctcagtgatgattccaccgccaagactgctctgttcgttctggtataggtaattgttggcctcgtcacggctgagatcttcttccagataccgggccgtttcatcaagctccagatttttcgagacttggtgcatcgatcgtttgactgtttcattgaactgctcgctacttttcttgagtatgatacttacatattttacttgcaaaaaaagcaaaccggcaaaagcaaaagccatcaccaccgcaagcaaccaaatcgtagacttcctcatatcaataaatctctcgttttaatatcacaaataacgcgccttttaatttaatatttacacaaaaaaggtaaaaacagaatgcctaaaatgttaaaaaatgcattaccaaaggattgcaattctctttctatctatttttaaactaacgccttacatccctttcacagacgtatcatcatatcttgcacgttccgtactaattagtaagaacagctgtacaacatgaattgttgtagccgacacttaaaaacttttcccgaaagcattgacttttaattattaactctatctttgcctcccgtaagagttacgtgaaatgatacaagaaggtattacacagatagacatcaaacaggtattacggcaaaaggcgccttcggctgcccgtaagattcccggttttatggttgactatctgatccgtactgttcatcaggatgagctgaacgagatcctccgtcggtatcacgataaagacggggtagcgttcatgcaggagttgatcggatattttgacttgaatctggaactggtaaacgaagagaatattcctgccgaagggcggtacatattcgcttccaaccatccgctgggcggactggacgggatttgcctgtcggccattatcggcggacgtttcgacgggaagatccgctacctggtgaacgacctgctgctctacctgtctaacctgaggtcgatcttcgtccctatcaacaaacatggggcgcaggggaaaaagaacgccgaactaatcgaaaaggcatacgcttcggacaaccagatcatcacatttcccgccggtttatgctcacgcaaacaaaacgggaagatacaggacaccgaatggaagaagtcgtttatccaaaaggccgtggaataccggcgggacatcgtaccggtgtttttcgaaggacgtaactccaattttttctaccgtctcgccaacatgcggaaagctttgggcataaagatgaattacgaaatgatctacctgcccgacgagatgttcaaaagcaagcacaagacatacagcatccatttcgggaagccgattccctggcaaactttcgacagtagccgtaaaccggctgagtgggctgagtgggtgaaggaaatcgtctataatctaaagaaataattgattttattatatgcaagacatcatcaaaccgattgaccgtgctctcctgaaagctgaactgaccggggacaagaagctgaggaggaccaacaaatccaacaatgagatatacattatcacagcccacgactctcccaacgtgatgcaggagatcgggcgactcagggaaatcgctttccgatattacggaggcgggaccggctttccggtcgatatcgacgaatacgatacgatggacgacgcttaccgccagcttatcgtatggagccctgaagacgaacagattttaggcggctaccgcttcctctgcggttcggatgtaaaattcgacaaagccggcaaacctgttttagcaacttcccaccttttcaatttctccgataagttcaataaagaatatttaccgtacacggtcgagctgggccgttcgttcgtaacgctggaataccagtcgacccgtagtggcagtgcgaaaggattgttcgtattggacaatctttgggatggcctgggagctctttccgtggtggaccccagcttgcagtattacttcgggaaggtaacgatgtataacacctacaattccgaagcccgcaacatgatcctgtattttctgaacatgcacttccccgacccagagaaactgatcactccgatctgcccattggaaacaggcacggatccagaaaaaatgcaggagcttttcaagtatgacaacttcaaggacaattacaaggtcttgaaccaagaagtccgcaagttcggcatcaatgtgccgccgttggtcaatgcttatatgagcctctcccctaagatgcgtgtattcggcaccgctatcaatcatgagttcggggaggtggaagagaccggcatcctgatcgccatcaatgaaattctcgaagacaaaaagaaacgtcatatcgaaacttatctgaacgaggaaggcaaatcggccgacttgatacgcaatagttaagaacgggatataaagacatacgaagagccatgtacgccagatgatgcatcatccgcatacatggctcttttatgtttagccttaaatcactcttcgttcttctgtttctcccactctccggcaatttcctcaagagcctcgtaccagtcctttccgaaacggcggaccagcggttccttcagaaacttatagaccgggagtttttctttcttacccagtatctctgcggctttgcagatactccagcgattataattaactgcttcgaacgtgtcgtacttttccacacgtatcgggtaaaggtggcaggaaaccggtttatagaaagagagcttaccttcgcgataggccttctccaccgcacacttgcaagttccgtccgcatcataacaggtaaaaacacagtctttcccgtttacgatagaagtcactaagtctccctcttcatcaatataggcaacgccttgtttcttgatgatctcctgagctttcggcgccagatcgtcccagataaccggaagggctttttctagttcgcccacctcttcctccagcaggggtgcaccggaatcaccttccacacagcaaatacctttgcaatgcgacagatcgcataagaactggcgttcgagaacgtcgaggctgactagggtattgtctatttgaatcacttcttaaattgaaaattaaaaattaaaaattagaaattagaaaataaatgcttatctccctaatgatgattttacagacttgactatgctaaccaaaagagcaatcaattccttacaatcaatcgagatagatttataaatctgttcacttaaataatccgtatctctcaataaagagagccaataaaatgtttcattagcttctttcaaagcaacattcattttattaagaaaatcagcactgctttgtgcatgatgtgcttctgcaaccaatgctcctatagcagtaccgctccgcaacatctgttttgataagacatactccttttgatcatttgttaaaaacttgtatgcgttcactatacgaatagcaaacgcatacgatttagtctggatcacattattcaccagtcttattttttaatttttaattcttaatttttaattctttatcaagtcctgccctgtcatatcagccggctgtgccatacccaaaatatgcaggatagacggagcgacatcggccaggacaccgttttccacttttgcatttttgttttctgtcacgtatacaaaaggaaccgggttcagggagtgagccgtgttgggagtaccgtcttcgttgagcgcgtgatcggcattaccgtggtcggcgatgatgattacttcatagccgttggctttggcagcctcgaccgtgtctttcacgcagttgtcgatagccgttacggccttttcgatggcactatagataccggtatggccaaccatatcaccattagcatagttcacgacgatgaagtcgaacttctgcgtattgatagcctcaaccaacttgtctttgacttcgtaagcgctcatttccggcttcaggtcgtaagtggcgactttcgggctcggaaccaagatacgttcttcatttttgtacggagtttcgcgaccaccgttaaagaagaaagtcacatgagcgtacttctccgtctcggcgatatgaagctgtgttttcccgttttcagccaggtattctcccaatgtgttctggacgttttccttgtcgaacaggatatggacccctttgaaagaagcatcgtacggagtcatgcagtaatactgcaaaccagggatcgtgtgcataccctgttccggcatatcctgctgggtcagcacgacagtcaattcttttgcacggtcgttgcggtagttgaaaaagatcacgacatcaccttctttgatcgtaccatctactgtagcgttgttgatcggtttgataaactcgtcggtcacgccttcatcatacgattcctgcatggcctgaaccatgtcggtagcctgtttgcccttgccttcaaccagcaggtcgtaggcttctttcacgcgttcccaacgtttgtcgcggtccattgcatagaaacgaccgacgatggatgcgatctttccggcagactgtgcacagtgggccgtcagttgttcgataaatcctttaccgctcttcgggtctgtgtcgcgaccgtccatgaagcagtggatgaaagtattgtcgattccatattccttggagatatcgcaaagtttgaacaggtggtcgaaagaactgtgtacgccaccgttggaggtcaaccccatgaaatggatatttttgccatgttctttggcataagagaaggcagaaacgatttcagggttcttcatgatgctattgtcggcacaagcgcggttaatcttcaccaaatcctggtaaacgatacgtccggccccgatattgaggtgtccgacttcagagttacccatttgtccgtcaggcagcccaacgttttcaccgcttgcctgtaactgtgaatgaggataagtggccagcaggctgtcccaataaggagtgggagtgttaaagattacatcgtctttaccttgatcgccgataccccagccgtcaagaatcattaaaagggctttcttgctcatgattgcttaattatttattgtttatactcattttcgttattcgggcacaaagataagcaattccgggcatatattgtttgcttggaaaatattacttttgtgaacgatatggaaaagacgatacaagataaagagttaggaaccatccacctccgcaccagtccccgtgctacccgttacacactgaaaatctccaaagggacgattacggctaccatgcctccgggtggaaacgaagcgcgtatgctcgcttttatccgggaaaacaagaaaaaacttcttgccgcccttgccaaacatcccgcccgcccgctcctgacagatgagacgaagatgcaaaccgcaacgttccgcctccatgtcttccgtaccgaccgggctaacttctatatgaaattagacgatggcgtcctgcacatcgcctgtccctcgcagaccgacttcgccgacgaacgtgtacaaaaactcctgaaagacttcattgagcaagccctccggcatgaggcccgccgcctcttaccttcacggttgctcgacctggcctcccggcacggcttcacctgcacggatgtaaaaatcttcaacagcaaaagccattggggtagttgcacaccacgtcgcagcatcaatctctctctttctctgatgctcctgccctggcacctgatcgactacgtcctcctccacgaactttgccacaccatagagatgaaccacagtgaccgtttttgggcattgatggacaaggtcacagaggggaaagcgttagaactgaggaaggagttgaagaagtatcatatgctgtaagccggattgcggaatatctgattattcagtccttggggtaatcgttccatgatctcgatgttgcttaagacatatgaccacttcttataaagcgtgtcacaaaatcgttttccacttcctctgtcactgtatcactgatttctttgtaccaattgatattcaacttgtcttatctgtgatatatgcccgttttctctatcactacggcatcactaccctatcactgtctcgtcctgattttggttgactgtgtattaaaaaaatcctgttataggttgtctataaatgtaaaaaaacagacaatcctttcttaatcctaaaataagttaccttatcctgtttcactacaggacagggggcttttcacagccaaactcatcggccggggagcgcccaagcggcaaggggcagggccacctgtcccgacgagcgtttccggtctctgttctattttgttgcaaatatatcagtttaatcctgttcataaaagaatagcttgtttacgtttataaatagttttccattttctttttaaaggccccttcttcgcatgcgcctcttcaggtgtcaacatttccacactactgtgagggcgccgggtgttataaatatcgatcactttcctcactatatcccgagcctggccgagcgttgttatcatttctttattcaaccattcttcttttaatattccattgacacgttcagctattgcattctctctgggatctccgttttctgtcatacttatacgacatttaatgccttgtaaaattgagatataatctttgctacaatattgtactcctctatccgaatgatggatcagatcgcttcccgggggaagtgtttccaaggccatattcaacgcttttatcggaccggacatctccagggaatcctccagggcccaaccgacaatcttacgggagtatgcatctgtgagcaaactcaaataatagaatcttccttcgacattgcggacataagtgatatcagctacatataactgattggctgatagtggatcataatcttttatcagatttggatacttatgaaaacggttccatgacagagttgttaccggccgataaaccctggaatgtctgatcaacaaaccattgtcgcgtagcaagtcaaaaaacttatcgcgccctatatccaaatcaggatgtatcttggtttttaggatatgatacaacttacgaccacctaaaaccggttggtcctgacgcaggctgtttaccattttaaggattatttcatcacacaacaattccgattgtaactgtttttctctcttataataggcttgcttgctatacccaaacaacgaacaacaatcagggatacttatttccggctgattgtcatgaagccttttcactgcttggtgccagagttttttcggatatcgatgttatagtgttcattggctagttctattaggatttccatcgcacggcgatgagcttgctcatgcttcagttccttctctttatcctttaactccaactctttttgtttgagggcgcgttccagttctttgatccgtttggaaagatccgattcgttttctgtcatttttattgatcgctttttgagtttcagtggttttattgacactgatgattgtctttttgcctcaaatttacgaatccaatgcgatattaccgtagggtcgcttatggaatatttaaaggcgatctctttacggcttactcctaagcgatattcacctatagctgctaggcgaatctccaaaggataaggttcacccttgcgacgagtcaatgacttctcttttttcatctttgttgacttttatgaagtcaacctatttcaggacgagacacactggcaatttggataaaaataggcactccgcttatatacaactgtatattaatacattacaaatagcacaaacaataaaccccctattcccatccctgcaaaccactcgattattttatgtaaaaacgggtataaaataggtaaaaccgggtagtttttattgtccggcacggtactttagttgccggacacccccatgttaccccctcttacacccggatgtaccggctctctacacccggatgttaaggatggcaacatgggggtgtttacggaattatctgcttgtttctgctaaataaagagagggcttttgtgaaatgaagaaccgtatttcgccaatttaatacctattcaacaatatgataaaacgtcatattggaaaattttgatgcggttgccctgttacttcgacggtaaatatatcgtcataaaggacggaagatcaagtatctttcctatttctttccagaaaaaacgaatcccctgcaatcattgactacaggggattgttttttgtctgcttcggtcttcacagagggagagcagatgaactttttttaatttcattactttagtattaatattcaccgcttgttcgccctcgcggggtaattggtcgatccggacggagagctgtaaaagctgatgtgttccgggaataccacacgatgaatcttagaattatttgattttaatatttcgaaagtgccgcgcactgatgtacgcgacacttttacaatctatttgccaattacttaacaatagctttaacagcttcttcgccttcaacagctactacaaccacaccctgaggagcagcgatagttgcgttgtcggaagtgataactgtgttagccactacctggcctaaaatgttgctgacaacaactttcttaccggtagcgcctacgatctgaacaccaccttcagtagcgatcactttcacttcagatacttcaacaccttcgtttgcagtaggagcttcagcagcgtccaaagtaaatacctgaggagcaacagtgttagagaagataaccgtaccgttaactacagccaaactcttgtttgtattaagagctacgatttcataaccttcaccgtcaacaactttgaagccaacaagagaagtattcttagcatctcttactttatatttattctgtttgccatctttcagatcgccagtataagcaatcgtatcagcaacaacagttacaccacggaagattgcgctgtcgcctgtagcattgtttgcaacgaagtcacccttagcagccaaaacgttaccaacgattgtgtcgttcttaacttctgcacctttgtagatgtagtaaccatattctgtattgtcatcgccacgattcacataagcagagtcaacatacagagagaagtcagaatcatcagcagcagctttcagttcgtcacctacgcgcaacatcttagcgataccagcagaagcagtcaacatttcactaccgtttactacattgtaatgacctgcatcaaccttagcatagacaggagcttcagcaccttcgatgttgaagtaagtttcaacacttgcagtcggattatcataagttacagtaagattagagatattcattgtaaccatcttagcagtattttcattagcagctaccaccttataagagccaccgacaggattttctgcgaagaagaaacgtttttgattttcattaacagctccgttagtagaagatgtcaattttacaacagcgccttcataagcaaatcgaccttcagcattataagctttttccattgcataagcaacacgaaccaatgtatcacctaaagcctgagcaccataataaatagtatcaccaacagtagccaaatcagccccttccatcagacgcaattcaacagctttgtcagcacctttagcaccagcaattacagaatcctgaaccaaagtcaaatagatatcatcagcagctttagaagccagattgaacttaacagcaccgtaacccatttcttcttttgtatagtacttgtaaccgatgtgcttgttagccatatctacatcgagttttgtgaataccaaagtatcaccaccaacagtagtgtaaatgctcttagctgcatctactgcgtacaaaggttgatttgtaaacggttgtgccggagcaacaacagctaaactttcaccattagagcctgtggtaacgcctgaagaaacagttgcagagacaatatcacgagcctgagcagaataagtaccatcttcgttttcctttacatagaactgagtagaaggaacatatacagaagcagcttcggcataagtaccacttgtaccagtcaaatacttatcattattagttgcattaccgcctgtacctttaaactgcaaagaataaacacctgttccaccagccagtttaaccggagtacctttagagattgtgataagcggagcattgatctggatagagtctactaccaactttgcactaccatcgaaactcttgtaacctacaagataagtaactcctgaaccagcaccatgatctgcaacttcaaattcgccagctgtattgaaacgaacaatagaatcagttgtcataacgatagaatcgttacccaagtccattttcaaagtaaatgtctgcaaaccttcattcaaagcacctttatatgcagaagatgtaacagtaatagttgtatccaactggaaagaagcagcttttacagaagcggcagtacccaccattacagtatcgattgtaatatactgcggcttctttgtacccttcgtgctgttttcctgaccaactacctggaagcggaatttgttaccgacaggaaccggaatcaattcattagcagtgaaaagaccaccgtcacgaccggcaaagtcaaatttgaatgaaggaagaaccggagcaaggtctgcttttgttacatcataatttgcttcagctgcttctactgtgaaaacagcagccgtacctgttgtaccagctttgtcagttttgccatcaaccatcaacaagccggtagtttgagacatctcaaccaacttgccatcagtagttgtaccgataatactataaccacccgtaccatgtttaattttaaattcgctaataccagcagcaatagccgtaccgaatttatctgcgccattcaatttagcagagaaagaaagctgtttctgagtagctttgttcgtcaatgtgtagatagagtcattacccggcatattgacacgaaccaaattggctttccacaaagcagagtccatatccgccttagtagtacctttactaccaagtgccacagagtctgccaaagaagccttatcccaagtcaggtaagtagaactggtcttcaaatgcacatacttgtcaccgatctgtgcataagagacagtagcaattgctgcgaacgcagcaacgagagtagaaaatctcttgttcataatctaaattttaatattaataatacagttaattgaaatatcagttcttacttcttactatcattatgtacacgtatatataatgtacacgtgttaacatttgtattttgatagcaaaaacgatccttttttttagtcattttttttgcctatcttcgatgttcgtattggaaagatggttttttgtactccaattgctatctaattgataagaaaggatataggggtacgaatttttttacagaaaagagttgtggtttaaaaaggaatgcgtatttttgtctcggaaaaatgacaaatttaaaggatcgttttttttagtcattttttagcccaccaatcacttgatttacaataaattattttccaattaccaagtcttaaatttcatcagccccgttttggttcaaaaatcggtccttttcaaggaaatccttgatgcttactacgtttcagagggatacttatccgtttttgatccgatgcctatttgtttgtttttcggtgattgcccgattttcctcccccaaacggccattattactgcatcggcacaaacccttcgtagcggaccgtccagctcccgtctttcgggaaaccgggagcctccccctccgagccgtcccaaccgccacacatcatggcgactgccgtcagcaacgctccgttggaagggaaatagggaaacggaccgcctgtcgccaaaccatgttcgtcgaactggaatccggcggaagggtgcatcagcatgtcaatagccagtgccggctgtcccgtacgggcggcagccattgccaacatcgggaaatcccaaccccaaatgcggttgaattgccattctttgctgactttctccaacgtgcgcttgaaagtcggctggtctaccccatcaccaggcaacatgccgtagacaccggtcagggccggatgctcgtaggtatattttgtccacatatcggggatgccctcgtaggtggtatagacgccgtcggcaacgggaagggacgccatcttcgaaagtacttccttccatttcttcgttcttttttccgacaggcccagccggtccgcccattccaacgccgtgcgcaagccgtagcggaaatagcctaactcgaaaatcggattgatggtctgcaacgggtccgtattctcggaaacgacaacgacaggaggacccaggacatattgtttcgtctttttgtcgtagaaaaggtaatctgccatataatcggccgtgttcagcacgacgtctttccatttctccaatgtttcgggagcaggtttctgacggtattgcatctcggcgaagtagatcggatggggttcgtgccagatcagataggcatgggcgctaccaggccattcgcggttgaagtttccggtgcacttcggccaacgtgcaccgctacgaccttcgctcttggcgcgttcaagggccttcggcataaagtccttatagacgttcagatagttatcaaaacattccatccggttccacaacccgtagtgcacaccatgccaccaaatcatctcgaagtggaaacggccgaaccagccgttattcaccaaaccggattcctgaggtgggaacagtccgctttcatttgcacgcatcaagtactgcgagaggacaatacgccgttccagttccagccagcggggatctttgcttccggagaggtcgacggcagctcccgaacgccagtacttctcccaactggcagcactcttccgttcgatagaggcaaccggctcggtcacatcggcgaccggttcaggagagaagcagcaggtaaaggaaaaggtggaagtatgctggggctggaggaggaaggtatgcgccttttcagattcacggctgaaagtggcagggccggtccagtcaagagtggcgtagtagtgcgtgtcatccatcgtacgggcgatacggaccgagttcggagccaacttctcgaaggtggaagtatggccagagatcgtgtcgtagcgtcctatatagtgtttgaaatagcgtccgtcgggataaggaaagtcgagatagatgctcatattaccatcgttcaacagttcggactcgatgctgactccgatcatatctttatcgggatggcagacggtacgcactttcacctctttgcggttcagttcgaaacggctatagacaacacctgtccacagatcgatttcctgccgggcattgcccaggtcaatttcccgcgcttccgtaccgtcttcacgcagtagacggaaaccgatacggcccaggttatagcgatgagggttcttggtcagccattcggacagttcgggctggtcgggattgcgaagttcataggcgatctttttgccgtgcgtctccacgacaaccggacggtaatcttcggctctcatcccttcggggaggggaaaactatgccagctccagtcggacagggtgttgaaggggacgaaggtctgcaatccggttatatccatcccgaaggcaaacttgccgttacctacttgtgccggacttttcagaagcgtcccggtcgtacacacgcgatgccgcttgacaacggcctcccggtcaatgggctctcccataacagacaaaggtaaaaagaccgacaggcaaaagaggctgactaaacttatcagttttttcatggtagttatccttttatatgtttctgtggataaagataagagattgccgccaagcctcagtttacagttctgacatttttccttcgatttctggtaaataatggtttacttgttacttttggcttgatccaaaagtaaccaaaaaatcaaggcttaaccgtccggtctactccgggcaaagggcaggcagcatcgaccatccttgagtaccagagaagaccggtcctactatattatatattgccggtcttcttcttccaaaccaggaagaaggctaaaacaacgattgttatggcaaagccgataatctgtgaaatgccgttttccatgcctaagccttcaggagcgacaaagatgtatgtcgagcagacagccgtcataaacaaagccggaatcagcgtaacgatatagggcttcttcgagatcaccaagtagacagtcaatgcccataaggtaaacaccgcgagtgtctggttactccaagcaaaatagcgccaaatcatatcgaaaccatccttgtctttctggctgtaaagcaaaagagcgatagccaccaagaacaaaggaatgcaaatcatgagccgcttggagacactgcgctgttcaagatgcagaaagtccgccacaatcaggcgggccgaacgaaacgccgtatcaccggaggtaattggggcggcgatcacacctaagactgccaatataccacccaccgtaccgagccattctttcgtaatactgtcgacgacaacggcagcattgttttcccccataccattgttatgatagaaataagtagcagcagcagcccagatcaacgcaacgataccttccgtaatcatagagccgaagaaaataggacgtccgtacttctcattcttgatgcaacgggccatcaacggactttgtgtcgcgtgaaaaccggaaatggcaccgcaggcaatgctgacgaacataatcgggaagataggcagatgaccgggataggtgttcggcatcccgtccgtgatttcaggcaacggcggatgattgacgaacaacatcaccagaatgccgatcgccataaacaacaaagcggcagcaaacaaaggatagattttcccaataatcttatcgaccggcaacaaggtcgccaggatgtaatacaagaacacgacaatgatccagaaagtagtatccagatgttccggtgtcagctttgccagcaagccggcaggcccggccacaaacacggagccgaccagcaccatcaggattaccgtaaaaccacgcatgaactgcttgaagttcacgcccaggtaacggccgataatctcaggcaagctctccccgttatgacgcagggacaacatcccggacaggtaatcgtgtactgaaccggcaaagatacttcccaacacgatccacaggaaagaagcagttccgaacttcgctcccataatggcgccgaagatcggtcccagtccggcgatgttcagaaactggatcataaagactttccaagttggcatcggaatataatccacgccgtcctggtgcgtataggcaggagtctgccgtttggcatctatgccgaaaatacgttcgatgaatttaccgtagacgaaataacctacgatgagtgcaataaggcaacaaacaaaagtaatcataatcggtaattgaaaatggaaaattgagaattgaaaattagattgataaggatacaacaagagagagaaaatggaaaatggaaaactgaaaaataaaacaattcttctttatctttcaattttccattttcaatcttcaattcagaagttttttaacgacttccgagatcatacgtccttcggcttttccggctaatgccttggaggcaatgcccattaccttacccatgtccttcggaccggtagccccgacctgtgcaatgattgccttcagctcgacttccagctcttcggcagacatctgtttcggcaggtacttttcgataacggctacctgttccagttcgacatcggccaaatcctgacgtccctgctgcacgtagatagcggcggaatccttaccctgtttgacgagcttttgcatgatcttcaatgcatcggcatctgtcaatgtatcgttggctcccggagcggtcttcgcttcgaggaaaaacttcttcacgtttctcagtgtttcaagggcgactttatctttcgccttcattgcgtttttaatgtcttcgctgactctttcgaacaaatccatagttttgcaaattaaagaattaagaatgaataattaaaccttcgcgtatccaactactcatcattaatttttcattattaattatcaattagtcattattcattacctaaaactaataactgtgccgccagatttaggcttcttgttttggttagtggcaggcgaggtgaacgacatgccttgggtacgtaccggttcctcacccttccggcgtatctgctgcacgtctttggcagtccgcttgtaggcaggtttgtcttccatgaaagagatcagagcgtcatcgtccaattcgtcgacggcaaatacaacgatttcggcattcggacgcgagtcgatatattcaccgtaataacgtcccatcaaggcatcttcttctgctcgtctttttctttccgcttcttccttctctgccatttcacgcagttgttcttctgtgacaagctcctgctgttccgtcttggtcaggatatcttccaacccgaaaccggtcactaagatcgtaatcttgatcttatgccctaaactgtcatcataaccatgtccccacttcacctcgtattcagtcttgaattgcgacatgaaatcatgtatatcgtccatttcactgatacgaagttcgtcttcatggctataataaatgacaaacgctacccgtttagcattgaaaatattgttcacatcgttgaccaacgtactctccaaagcttccgtaatcgcttgtcgcaaacgtccttctccttctccgaaaccgatactgatcaaagctacgccactgttacgcatcgtcgtgtcgacatcggcaaagtcgacattctgttccaaatcggtcgtcacgatttcggctatgctcttggccgcgattgtcaatgtttcatccgctttacgattcgcttgtggaaccggcatgtcggcaaaatttctcaatcgctcattgttaatcactaaaagcgaatcgacattctgcgccatatttctgacaccacggagcgctttcacgattttcggccgtccttcaaagacaaaaggtatcgtaacgataccgacagtcagaatccccatatctttagagatcttagcgactaccggcccggctcctgttcccgtaccacctcccattccggccgtaacaaaggccatacgagtaccgtcatccaacatccggtagatgtcttcttcactttccaaggcggctttttctcccacttccggaacattccccgaaccaagtccatgcgtcgtattctgtccgatcagcaatttattaggaacctccgacttctgcaacgcctgattatcggtattgcataacacgaaagatacatcccggataccttcgcgatacatattgctgaccgcattaccaccaccaccaccgacaccgatcaccttgatgattgtctgaggcgcttttgccaaatcaaaatcgtatgtattatcgtccattgtcgtctgtcttttattgttaccgattattgctcatctttcaaggccttgtcaatgccttctcccaccttatccaccgcatttttgaaaaggtcgccgataccccagcccttacggttctttttctcttcctccttctttgttccggaattgcggttcttagtcgtagccgctgactgcttttcaacaggcggttcctcctgcttttcttctatttcagcgatcacgggttcttctttcggctcgatcttcggttctaccactttcggtctctccggttcgggagcgatataaagggcgcagttctccgttccttttagcaacagggcggctgcggtcgtatattcgggattattggcaatcatctcgccgtcggcaatcagatctttccggacggaagcataacgaacatccatcttgaaacgttcgctgagggcttcacgcatgttcttcagagcggctccgttgccggcaatcacgatactgtaaccgggatctttcgccactcccgcatcttccatgcgggcgtatatgttttcgatgatctcacggctgcggacttccaccaccatattgatatccgaaagtttgatctcgctcgaatgctgtccgtcggccaagtctaccgtgaccatctgctgttcgttatctttttcccagatagcgttgccgtaggtgcgcttgacacgttccgcttccttctccagcatacccaaggacatcaagtcgcgagtgatcagatggctgcccaacggaataacgtagagaccggccagactgccatccttgtacatcgtgacagaggtgacgcctgcaccgaagtcgatcaacgcacaccccttcaatttctcctgttccgtcaggatcaggtctgccaacgccagcggcgcaacaacaacacctgccacatcgagcttgatctgctccgccatattcgtggttacggcatgacgaagagacggacggccaacgagcaacttatagtgggcttcaatacgcgaacaccccaaacctatcggatgggtttccgcctggttgtcgagataataaacgggagcggctatatccagcacgtccagcatatcgggacgatactgccggcattcctgatccagttccttcagcacctcttcagtcaccgtaccgctaccgagcactttcgacacggcatggttaatcgaacgaagcgactggcctcccaccccgacatatatcttaccgatacgggagccacccaatttgttttccagtttgcggatcaaccgcacgatcttgccggctgcatcttttatattatatacacatcctcttcgtatacaggtatcggagttctccacttcgtaggcaatgatggaaagtgtcccggcagggcctttcgcgcctaccatgccgaccatgtgagaagagccaaggtcgatggccgctataaagtctgtgtatgccatattctctatcttttagtacaaacaatctgatccttatattttaaactgataatgctgtacttctcccaccccaccttcgggatcgctttctcgtagaagagccggagattgtccagcttctcctcgaaatcagcaaaggagcccagtacgatacgatggttaccgacccgcggaatcagctccacctcgttatcaggatgaacgtaaatctgttctatctgattattccagaaatcattctcctgcaaaaataatgcaaatttgtataagtcggttaccgccagctctttttccacatatccgctcacaaccggaacgtgcgccacatagcggcggctaacaggcatcgtgcttcccaaattatccacataatagttgcctctcggacttatcacacgcaagataggaattttttgctccacttccaatttaatcatgccggaaggagtcttataggcttccacacgggcaatcatttcgtttttcagcaattcgttttcaatccggtcggtgttgatctcgtccatcggcctcttgatcgggttcaagtcagccttcttgaggatatgcaccaaatcgctctcgctcacaaaatgcttgtcaaggctgtccacgaccactacttgcaggtcacggcacaactccttctgcctgctttcccgaaagaagaaggagacaaacacgatgtagcagaacaacagtgttgcaacgattatggatacgatacggatcacgatttattcttttttatccaatatttgttttaccggatctaccaacagttcaatattaccggctccgaccatcaggacgacttcgagattaccggcttcggcagccaccacgtccaacagttcctccttgcggatcaaccgcttgtcggcaatggtcacggcatcgaagataatctgtgaagtgacacccggtatcggctcctcacgtgccgggtagatatccagcagtatcagttcatccaggagcgagaggctggcggcaaagtcggcggcaaagtcacgcgtacgggtgtaaaggtgcggctggaaaataccggtcaccttgcgtccggcatacagctccttcacggaaaggatgcttgccttcagctcggcaggatgatgggcatagtcgtcgatcaggacgatattttctttcttgagatggaagtcgaaacgacggcgcggaccggcaaaggtcgccataccatgcttgatctcctccggtgtcacaccgttcagccaggcaagggcgatagcggcaactccgttctcgatgtttactttcacgggcacgcccagctgtatgtcggggatgcggacatcaggaccgacaaagtcgaagaagatttcgccacctccgatgcggacgttctccgcataaaagtcgggacttcctgttgagagttgagagttgaaagttgaaagttcttttgcgtcgagagcgccggtataagtataaaacttcacgccttcctgcaggcggggagtgacgttgatgccttgtttcataagcaggcaaccgtcctggcggatcaacgaggtaaaatgttcgaaactttcacgataggcttccggagtcccgtagatatccaggtgatcgggatcggccgcagtaataacggccatataaggtttcaaccaatggaacgaacggtcgaactcgtccgcttctatcacggtcaggtcactcttgtcggaaagcatcaggttgctgtcatagttcttcaggataccgcctaagaaagcattgcaatccacatgagactgtttcagcaggtgggcgaccatcgaagaggtcgttgtcttgccgtgcgtaccggccacacacaatccccggttgcaaccagtgatctcgcctaacacacgtgcacgcttcatcacctcgaaaccattcccccggaaatagcaaagctccgaatggtcttcgggaacggcaggagtatagacgaccagtgtctttgccggatcggtaaagtcgtcggggatcaggtcgacattgtcttcatagtgaatggcggctccttcataattcaactgctccgtcagaccggaaggagtcttgtcgtaaccgcccaccttctttcctttcgaaaggaaatagcggatcaaggcactcattccgatcccgccggccccgataaaatagacagccgttattttgtttatatccatattttcttactcgttactattctttgttacaaagatacgatcttcccaccgtatttgccataaaagaacggcatcttcttcagaaaaggctatagcttttcttgtaaaagactataacttttttcaccagaggccatagcttttccggcaaaaagtcatagatttttcttttcgataatcttgacgatctcgtccactatgcgttccgcgctctggtgctgggccaatgtcgcgatgttgcggcccaagacacggagacgttcgtcgtcgtggatgatttcgagagccttcggcaccaattgctgttcggcatctttgtcggccaccatgacagcagcatctttacccaccaatgccaaagcattcttcgtctgatggtcttccgccacattgggagaagggaccaggatcaccggtttcttcagcaggcaaagttcggaaatagaactggcgcctgcacgggagataatcagatcggccgccgcataggcatagtccatacgggtgatgaagtctgagcaccagatcggcattcccctgtaagccttcagatgtttcaaggcttcttcatggtaatagcgtccggtttgccagattacctgtacgtcgacatccgaagcgaaaagtttatccagatctccctgtatactgcggttgatcgtccgtgcacccagactgccgccgaccaccagaatagtcttcttatccggggagaggccgaagaacttcaaggcttcctcacgcttgtccgacgcctcttccagatcctgacggaccggattgccggtcacgacgatacggtcggccgggaagaacttctccatgccttcgtaggcgacacatattttaccggctttctttgccaggagcttattcgtgacacctgcataggaattctgctcctgtatcagggtagggattcctaaggaagcagccatccagagcgtcggtccgctggcataaccgcctacccccacggcaatatcgggtttgaactcccgtatcgtctttttggcaagcttgaggcttttgagcaaacggcctgcgacacggatgttattggccaagtgggcacggtcgaagccgctaaccggcaaccccacgatgcgataaccggcggcaggcactttctccatttccatccggtcatcagctcccacaaacagtatttccgcctccggaaaacgtttcctgaaggtattggcaatggagatagccgggaagatatgccctccggttccaccgccgcttatgatgattcggtactgtttcatattttagtttctgttgttgtttcttctattgtccgcacggcctccaatggattctcttcacccacgggagctttcgcggtcgcttcgaacggtttgtccgaaacggtatcaagggttgcatccgcgatcctttcgctttccggaagcgtaccaccttcggcaacatcagcagtcccttcttcttccggtgtttcttcctcatttcccatattggctccgaaacggctaacgctcaagatgatgccgatataggcgcaactgattacagtcgacgtacctccccggctgaccaacggcaaaggttgtccggtcaccggtatcagatctaccgccaccgccatattcgtcaaggcctggacgacaaccaacaatccgcagcccagcaccaggaatttaggaaagagcttatcacatctacgagcaatcatccccaccctgacaagcaagatgatatacaggagcaggacaaagacacccccgacgattcccatctcttctataataatggcatagataaagtccgagtaagcctgcggcagaaagtcgcgttgctgcccatgtccggggaacttcccgaacagaccgccacgtgccagtgcaatcttggcatgcaccacctgatagtcgtcaccgtcaatgctgacagctcttcccggttcaaacttgacggcatccgccggatcggaaaaacgctcgatacgtgctttccaagtgtgcacacgatccggcatcaagtcgatcaccttgtccggggcaaaccgtataaaacccactaacatcaagacgccgatgatacccgcaccgcccaatctcagcagacgtccgatggatatctgcccgatgaacatcatcatgaaagtcacggcgaacagcaggatagcggtcgacccgttattgaagaagatcagaaaacaaacacctccaacgcctcccaagatgtaccagaacatctgtttatccgtgaaccaattccgcttgctcaggataaacgccgtataaccgatagcggctatcttggctatttccgagggctggaaacggattccgagaatttccagccaacgaggttccccatttaccacgacaccaacaaagggcgtaatggccaacagaaccatcgagaccggcaaaagcaaactcaacaaggaatagaacctgcacggtatgttgtgcatcaacagtacaagcacgaaacctcccaacaggaaagtcgcatgacgtacaataggagcccaatgattcgcattcttataagcaatcgtactggttgcactgaagacctcgatcaccgagaccaaacacaggaacatgaagatcacccatatcacccggtcgcccttgaacagtttacttgctaaatccatttcttcgtctttctttacaggttacgcacacaagccttgaactggtcgccacgatcctcatagctcttgaagaggtcgaagctggcacagcagggtgacaacaggacggtatctcccttttcggccagcttatacgctttcgatacggcttcttccatcgaacgggcatcctcgataacaggaaccttcccgtcgaagaaaccatgcagcttggcattgtccacaccgaggaatacgagggcgtgcacctttttcttcaccagctcttcgatttcggaataatcatttcccttatccgttccacccagtatcaagaccagcggagtggtcatgctctgcaaggcataccagcaggagtttacattcgtagctttcgagtcgttgataaaatcgactccgcgcacacgtgccactttctccaggcgatgttccaccccggtaaagtcgctcagcgaagcccgtaaattctcatcgtggatatccaccaatttggatgcgataccagaagccagcgaattatacagattatgcgttcccgataatgccaataaatcttcttccattgtaaacgttccgtttgaggtttcaattattatctttttgtcttccgtatagccctttacgccggcttcgtgagtttcggcgaacgggtagagagttgcctgcggatggcgtttggcgatttcgcgggcaataatgggatcgtcgttccagaatatgaaagcatcttcagccgtctggttccggataatgcggaatttggcatccacatagttctgcatctcgtagttataacgatccagatggtcaggcgttatattcaacaagatggcgatgtccgccttgaattcgtacatgttgtcgagctggaaactactcagttcgatcacgtagacggcgtgaggatcttcagccacctggagggccaggctgttcccgacgttcccggcaagccccgcatccactcccgcctgccggaggatgtggtaagtcagcatggtcgtcgtcgtcttgccattgctcccggtgatacagatcatcttggcatccgtgtaccgtccggcaaattctatctcggagatgataggcgtacctttctccttcagtttctttatgataggagccttgtcgggaatccccggactcttgataatctcgtcggcattcaggatgtcggcttcggtatgccggccctcttcccaacagataccgtgggcatccagcatatccttatacttgggtttgatggacgagaaatcggaaacgaacacatcgaatcctttcgcctttgccagcacggcagcacctgcgccactttcaccggcccctaagataacaatccttttcttcatttgatttatgatttctttattcatttatgatttatgatttatgatttatgcgtcgataataaatcacaaattataaatcataaatcactttacctcatctttaacgtcacaatcgtaataaccgccaggatgataccgatcaaccaaaaccggaccacgatcttcgattcgggcactacgttaaaaggtttctgtatcaaagcctgtattcccgcattaccgggcttctggaaatggtgatgaaggggagccatcttgaagatgcgccgtccctcaccgtatttcttcttcgtatatttgaaatagaacgtctgcataaggacggagagattctccaccaggaagatgccgcacaggatcgggatcagtaattccttccgaataatgattgcgaatacagcgatgataccgcctaacgtcaagctacccgtatcccccataaacacttgtgccggataagcgttgtaccacaagaatccgaccgttgccccgataaaggcagccgcaaacaccaccagttcttccgctccggggatgaacatgatattcaggaaagaggcgaactcgaagtgcgacgacatatacgcaagtattccgagtgccaccccgataatcgccgagcttcccgccgccagaccgtccaagccgtccgtcaggttcgccccgttcgacacggccgttaccacgaagatcaccatcaggacgaagaccagccaggctgcctcttccttatattcgcctgcccagttgaccaactgcgcataatcgaaattgttgttcttcacaaacgggatcgtcgtcttggtcgacttcttttcaaccgcatggtagcggacttcctcgatcacattgtcatgccgcacttccatattctccttgattaccacatcggggctcataaaaagcaccaggccgacgatcaaccccagaccgatctgtccgataatcttgaacttgccgtgcatgccttccttgttcttccggaacaccttgatatagtcgtcggcaaatcccaacgcccctaaccagatggtcgtcaccagcatcaggatcacatagatattggtcagcttcgcacaaagcaaggtcggcaccacaatcgcaatgataatgatgatacctcccatcgtcggcgtccctttcttactcatctgcccttccaggccgaggttacgcaccgtctcgccgatctgcaacatttgcagcttgtcgatgatacggcgtccgatagccgtcgagatgaacaaggacaagatcaatgccagggcggaacggaatgatacatacttgaacataccggcacccggaaaatcgagctgatccaaataattaaacaaataatacaacataaaaacttcgtttttcagttgagagttgaaagttaaatactgctgaatataactttcacctttcaactcttaaatatttcttttaactgttcccggtcgtcaaaatgatgcttcacgccttttacttcctggtaatcttcatggcccttgcctgcaaccaggatcacgtcacctttcctggcgagcatagtggctgttttgatcgcctgcgcacggtccgtaatgcagagcgtatgttccatatcggcagcattcaggccggccaccatatctttaatgatctcatccggttcctcgaaacggggattgtcggaggtcaggatcagctgatcgctcaacttggctgcctccttcgccatgatcgggcgctttcctttgtcgcggttgccgccacagccaacgaccgtgatcacacggccgttgccgttcaacacctcatggatgctgttgagcacgttcgtcaatgcgtcaggcgtatgggcatagtccacgattgccgtatatcccgatggagactggatcgtctggaaacgaccggaaaccgaatgcagatcgctcaacaccaccaacacttcttccggatctttgcctaacgaaacagcagctccatacactgccaacaggttataggcattgaaacggccgacaaagcgtgtcatcacctcacgcccgttaaccagcatttcagtcccttcgaaatgggattccaatatctttcctttgaaatcggccaatgtgcgaagcgaataggtcagcttcctggcagccgtattctgcaacatgacaagaccggctttgtcgtccgcattcgtaagtgcaaaagccgaagcaggcagatcatcgaagaatttcttcttggctttcaagtaattctcgactgtcttatgataatccaagtgatcacgcgtcagattggtaaagatacctccgttgaacgacaggccactgatacgcttttggtcgatcgaatgcgaactgacttccataaaagcatactcgcaaccggcttccaccatccgagccatcagattatgaagggtgacagggtcaggcgtcgtatgatcagtcgggattgcttcgccatcgatataattgcaaacggtagagagcaatcctactttatgccccatcttccggaacatctcgtacaggagtgtcgcaattgtcgtctttccgttcgtgccggtcactccaaccaatatcagattgtccgaaggattctcataccaggcagaaagtgatttgcctaaagcatccgccgaatctttcacccggataaaaaccggtttgctttcggatacctgtatgtcttcatccgaaagagcaggaatttcctcgcaaacaattgcggcagcccctttcccgatcgcgctttggatataatcatggccatctacggtcgtaccccgaaccgccacaaacaaaaagcctttttccactgtacgggaatcagactgaataccggagatctccacgtcggtgtttcctacgacctcaagcacttccaacggatgaataagttcttttagttccatagcctattttaatgttaatgaaacggtttgtcctttcgaaacccgtgaaccgggagatacggattgagaagatacccgccccataccattcaacgaagcccgtaatccaacgctttccaacaggtaaacggcgtctttcgctcccatgccaaccacattcggcaccaatccttcgcggatagggatatctttcagttccacatcttccctgccgtcctcacgcttagccgtcacccattgggtttcgatactgtcgctatcggcttctatatcgagtttgtccaaaacatattccaacgctccccgttcaccggctttcggctgcggcaacgtcactgccaatgaatccttttccatgtcgcggatatcgaatgacatatggctggcatagaccttctcggctatcgccttcactacgccgcctgacatcgtgcctcccgaaggatagccgttgcgcggctgacggatcacgacgatgcaggaatatttcggttcgtcggccgggaaatagccgcagaaggcgacctggtggccagcctggcggtaaacacctcccgaagcgatctgggccgtaccggttttaccggcaatacggacaaagtcagaatggacggccttgccggttcctttttccactacgcctaacaacatatcctttatcatattcagcgtacgctccgagcaaatggattcccggatcacttcagtagagaaactctgcacggtcttgccgttgtgcatgatttcttttgtaaagatcggacgcaccatcttaccgttgttggcaatcgcattatagaaggcaagcgtataaatcggcgggatctgagtctcatacccgaaagacatccacggcagagcagtcttcgaccagtaacgtacagtgtcgtccggccggcggattttagcacagcccgctccagggatttccagacgaaggtcttcgttcaaaccgatacggtaaagcccttccacatacttagtcggattcttttcatatcctttcaggatcgtcttggccaccccgatattggaggaataccaaatagcctgttccaccgaaatacggccgtaaccgcctttatggttattatgatccgtcatacgggctcctttatacatatagataccgttgccgacatcgaccgtatcgccgggctggcagacaccatcttcaagcgccaccatgatggaggcgactttaaaggtcgaacctggttccgtttcgtctgccacggcatggttggtatcctcgccgtagacgccttcacgaatacgccccatgttggtaatggctttcacctcgcctgtcgcgacttccatgacgacagccgtacccgatgcagcgtcgatctttttcagcatgtcaagcaacgacttctcggctatatcctggatattgatgtcgatcgtcgtgcggatatccattccttccaccggatcgacctctacaacattcgtccatcctccaccgagacggcgtacggaattcaggccggctacgccgtggagcaaagtatcgtattgcaattccagaccgttctttccctttgtcagtcctgttttaggatcgatatcgcggaacgtatcgccgatcgtacgggaggccaatgtcccgaacggcttctgccgttcgaccatctcccgcgtgtagaagccgctcttgaaccgtcccaaacggaaaaacgggaatttctttatttccttcaagtcggaataggaaactttaccgtcacaaacggggaactggcggctcttcttcttcagaccattcagcaggtaattcttatatccggcaggcgtcctgtctttcaatttgcgggaaaggtaaaaagaaagggagtcgatcccgttatgtttacttttcagaagcgtatccaagctgttccacttcttggtcggatgggtatagcaatctgcgttgaaatcgatatacagataaaagcaaggcacactggtcgccatcagtttgccgtcggaagaatagatatttccacggctgggatagatcaggcggttcggacgcttctggctctcggccaccttcatccaagtctccctttccacaaaagccgtatcgaaggcacgcaccaagatgcctattgctaccaatccgagcaacagcacgataaagaagtaacagaataaaatccggttactcttaggagcttgttcttttgatccgatctcttcttcagccatcttttacttatacaattcatacggcggattcttcgccgcttccaattctataccctgttcttctatcaacagttcaatctgcgactgacggctgttgcctgtcaattccgaagaaatggacagcgcctcgaaccgcacatcgcgcaattgctgttgtaagcggtcgatttcacgcaaccgctgcatacagacatatcggttaccgataaatatgaatatcagtacgacaacaagcacgatcatcttcgtatgcctgacaatgaaatcctctttcaggatcccaccccccaatatgtacaaaaaagaaaaacgattctccttcttctttttcttctgtttcgtttccattgccatactttttctgttgaaagttatcagactctattatccaactccgcaatccttagctttgcactccgggagcggggattccgttcgatctcctcgtccgacgggacaatcaccttattgtttaccaggcgaaacggagatctgatatttccaaagaagtcctgctccgcctttccttcaaagttacccgtcttcaggaagttcttcaccaacctgtcttccaaagaatggtaggtgatgacaaccagacgtccgccgggtttcaacacctgaagcgtctgttgcaacatctcacgcaaagcacgcatttcatcattcacctcgatacgcaaggcctgaaatacctgagccaggaatttcttctccttatcttttcccgtaaagggctttatcacttccaaaaagtcggcgatcgtttctatcttctttatttcgcggctgcgcaccaagacggaggccagcttgcgtgccactttcaattctccgtaaaggtagaacaagtctgccaactgttcttccgtatatgtattaacaatatccgcagcagtttgtcctgcccgtgtattcatcctcatatccaacgctccgtcgaaacggaaagagaacccgcgatccttgtcatcaaaatgatgggaagaaacgcccaagtcggccaacaacccatcgacctcacccgctacaccatgataacgcatgaagttatataagtaacgaaaattactgcggacaaatacaaaacgggaatccgccggaatgtttttctccgcatcggcatcttgatcaaatccataaagctccccttcgtcattcagccggttcaagatttcacgcgaatgtcctccacctccgaaggtaacatcgacatacactccggatggttgaatgtccagtccttccaaactttcatgaagcattaccggcacatgataacagacttctttttcttccatttcttcgctacttcatgttaaacttttccttaaaataagggcctgtagttggttgatttgcacatacatcaccctattggagggtaaaagtacacatttcctaatttaaccgccaagaaatatatgggaaaagtaacaaaaagttatcaacaggtcggaaaaacattcacattctgacacccctaaaccctgtcagaatcgcgtatttggacgattatacagggttattttcaaatatcgcattctccggaagataagcagctccgacttcttcaaatttccccaatcataccactcgtatatatgcacaaaaagcctctccgatatttctaccggaaaggcttatttgttttctgccctcttttctcacgagaagaggagcaatcgatttatttaattaataaatgcatcgaacttatttaacgatagccttaacagcttcttcgccttcaacagctactacaactacaccctgaggagcagcgattgtagcattgtcagaagtgataactgtgttagcaactgtctggcctaagatgttagtgataacaactttcttgccttcagcaccaactacctgaacgtttccgttaccagcaatcactgttacttctgatgttgtaatagtttcgttatctgtagccaactgatcgttttctttattctcaacattgaaaaccaaagcaccatcaccaccagtcttagcattagcgaatgtagatttatcatctgtcaaaactacacaaccattctgaatcttcagccatgcagctttttctgtaggagcgatagattcattaacggtagttgcagaattcggccaaatgttcgattcgaacaagaatgagttttcaggaccttcttctgttacattgttagccttttcaggatgtacataacggaatgaccatacgtagttcttatgaacatcttcagtcaacagattcttgatagcaggcagacccttagccacaacagaatcattataagcttgcagagttgcaaagtttactttgtcgttagccacgcttctatattgagccggcaagatccacaatgtatcagcaacacggataccttcaacgaaaccaacgcgagtataaccaccagctacgtctgcatacggtttgtcttgaccataaactgcaacagaatcctggaagcttaccatatatttagctctttcgaatccagggatagccggatgagcatgcttacaagccataggatcgtctgtaatctgtccgtcaggtgtaatatgcggaccatcttcagtacaaggagttccttcgatacctgcaaaatcattatgagcaacagaaatcaggtactgaggtttgatatagccacgtccacgaactacccaagttgtatcaatctggaatgccaagcctgttgctttgtctgcagtccacataccaacatagttaacgaattcgtctgtcaagccaccttccttattattttcgtccatcagatattcatgacgtacgttttcatagaatctcaaagtatcacggccatcagcttcaccaagatttgcattattgaaacgacgatacaacggagtcttatcaggattgattgcaaatgcagaagttctggtttctcccagtggttgtaccttaactgttgcatccagaatatcatccgttacaccagctttaacatttgaaattgcattactattagccttcacaattgcataatagcattcaccttcataatggttattttctttcaagaagaaataatcgataggatcagcgtaagctgacattgcatacttgtcttccttagcttcgtccatataagcatctttcaatgagattgcatattctgttctacgcaactgtttgatgccaacacgttttgcaacatccgctgttactgtataaccataatcagcaatttcgtcttcaatcagacggaatgcatctttaccgttcaatacattcagcaaagaatctttaccagcgcccttagctaaatacttgctgttttcgcctgttgcatacggatgcagatatttgaatgtatattcatccaataagaacttagcgtccggaatattcttataacctaacagtgaatcctgataagcttcagcgatcaaagctgcattacccttaacaccttcggcatcttttacttgtacaaagatcaaagagtccgttgccttgatattaattttagtagcagcagaagtatacatatatttagcaccttcattcaacatcagttgagctgtagcagacaattcggttgcgaactcacggtttgtgatagtaacaggagaataagcctttaccttatcagccgtgttctttttcaacacaacccactgataagccggcatatgagctgtcaactgttcgtcagcctttactgttacccaagtagcttcgccaccatttacatggatcggagaagccaaatattgccccttctgattcatgatgaaatacaaaccgtcctcaacagaagtacgaccgttgtaaacggcttcacagcctttataacccaaagaaatatcagtttccttcttgtcatagatagttacaatacgtactttatctttgatcaaatcctgaacagttacaaagttgttctcacctttcgtaccagcagctgtaggaagcacagttgcagcagcatcatcaatccaatcagaaccattagtagcagttttcggatcataatccattgcagatttaacctggattaccaagctatcttttgaaggatagtaagagaatgcgaacttatactgatctgaaagacctgttactttggaaatagagtctgcagcagaagtcggctttgtagcagcagtacttgcctgacgtttagcatagctcagatcagaccacttaaatgcacggaatctctcaccgctttcgttaacgatagcagtatcaacacgcagataagaactatctgccgtcaacacaaatacataatcattatcaccagaaatagcttcagccaagaatttgccagcattctttccattgaacgggttggcgacagcaaccttttcgccctgttcatccggtgtaaatgtcaaagcaacccccttatccgcagcttgcaaccccaaaattgtattgatttcaggagcctgcaaacgaatcatatcggcttcttgaagaataaacgtcgttaattcagaaccagcagctgcatctttataagcatcagctgcacctaacttcttcacttgaatatttgttccgtcagcaaccaaaccgattacagagtcagctttaaaataagaatacaatgtcttacctgcttgttctgctgccggaatagatgtatactggttcaagtatgcccaaccagagatttcaccaccgacacgagtagaatcatttgccgtttctacgtccgtataagaaggcgttttttcagccaaaccttccaacagagtaccagcatactggatatccagacgctgaccggtagctttgtttgtaaaatcaaagataggagctttaccgtaaccttcttcagttacttcaacacaccacaatgtacttgctaaatttgcagattcagtagttgcttccaattttaaagcaccttccggagtcatcgctaacactccaccagcagctttcaattgatacaagccattacccgttttctgcaaagatgttacaggattccctgcattagcagacatcgcacctaacaatgcaacccctgccaaaagagtagaaaactttttgttcataatcaaataatttaatattaatactaaagtgtaaataaatcaatcaaataacacgtacgtcttctaaatcttataatcaaataccattgcgtacgattttctcttggcaaaaatacgcataacttttcaaccgacaatccttttccttaatattttttccttttctatattctttcttatcaacaagataagctatcctgtacgaaaatgcttatttacgagacaaactctgatatttatagagaaactaccccaaagccctacatatctaaaattaatgtacatgcgtacattaaatatataaacaaaatcgatctctacataatataacggaaacaactgtcatacctatatattatgtcaccaatcctcacacaagaaacatgatgctatgacggtcgtttctaatttaccatcgaagttcacatattggcagatatgaatcatttcagcttcacccacccttgaaaccttttgattatcatatcatacaaaggtgaagacagacatccggactgccttcacctcaaaaatttgccttcaccctgtctcgtcctgatttgggttgaccatgcctccccggtttcacatccacacatttaagtaaaaaacaaggaggctacaatatcaattaatcaacaaatacacaggcattaacagctattactaccactcctttccttttcgcccttagtcgaaaaggttttcgactaaaggcaaaaggtctatgagcaggctgtttgacaacagtagcatggcgattgtcacttaaatagaaccttccggagcccgactttatccctgatggaggcagacgtaagcggtgaaggcacttttagtacctgcattcacccgctaaagcacaaacagtcatactattgtatgttgaagtaaaggcagtttgattcagttctcagaaccaagccttctgcgtacaaataatgagagattgagaaatgaacaccccttacaaagacaaagctatttcttcgcttaagccggtacactttactatggtagcaacgtctacacccgtatctttcatcctcgaagcgacttgacgcatgccttcggcaaggccttccgcttttccctctattctcccttctaatttggccgtgtcgatcacatcgttctggatcatgatggcgtcgagatggcggtcgtagataaggcgttcctgaggggacatggagtagtatttcaacttctcgcgggcttccttcagacccggtgcagtcgtatcgggacggatcgtgccgtctttcaggtattcgatccattcgtccaaaggggtgagtgccactttgtcgaactcgtttacacggaccaggatatattcggggaagatttcagcgggaagatgcgagacgatcacatcacgttcacgcgtgttgacacgcagatggtcacccgtatgtacaccgacgaaatgatcttggccgtgatagatatagtctgtcccgataccaatatcgaaataaaggatgctgatggagtagactttcttgattttcccatacccttcgccaatcgagatatgttcggtgatggctttggctacgccgtagaggatgcgttccaaataatgcagttcgcgtgtattctggatttcgacgaggatgatttcgcctttactgttcaaggctttgatgtcgacgcggttgaacttgtcgtcggcgctttcctggttgccttcgctttcgaggatttcgacgatcttgatttcttcgttcagcatgacggtcaggaaaccgtcgagcacatcgaaattggccttctggcgcaacagacgcttaatggcccaatcgaagcgaatatacctgtcctgcaacttttttctttccatctcttccatgattttcaaatccgacccttcctttttcatagttactgttttattagttcatccacaaatatacatattatttatgaacgggcaacgaaccgcaatttttttgtaatatcttatctttcaatgattatcgggtaagccatttcttccccagatagtggacaggataccaggcggcaaggaagccgatggaaaggacggttataaagacaataaggatatcaccggcttcgacacggaccggataggcatcgataataaaggagccggctgcctgacctaatttgataatacccaactcctgttgcaacaaacaaagggccaatccgataacgataccgatcaaagcgccgagaccggaaatcatccaaccctcgaaaaggaaaatacgacgaatcagacggtcgtccgcacccatattccgcaacgtacggacatcctctttcttttctatcatcagcatggaaagcgaaccgatcacattaaacagagccaggatcagaatgaaacacaggatcagaaagatcatccacttctccccctgcatcatccggaaagaggcttcctgctgttcatagcggtccttgaccgagaaatcatcgcctaagagtgattttatacggcttttgaccgaattgatgtctgcaccgggaaccaatgacaactctatcgccgagacttccttttcataatcgaacaaagagcggaccatcggcaaaggcagcaggacgaaattctcgtcatacatctgctggttagtggcatatacgccgccgacaaaagcatattccaaattcaaggaagcgacagggttggcgagattgactttctcattcctcttgggagcgtaaatttccaaaggatcggcataattaggacgcacccccaaagaaaaagccgttccgacacccaagttggcgtaattggccacttcgtcggacaggacaaaggaaccttcccggctatcgactaaaatactgtctatccgcgtcagacggccgaaagtatcatctacacctttgaccgtcgcggtaatctggcgatcccgatagcggacctgcgcattgtcctggagcacttcgcaaaacaaagcgacctcaggcaactccttcacttcccggacagccggaagagtcggatcgaacacctttccatgtacaggctgaattttcagctccggatcgaaattgccgagcatcgaagaaaccagcccgacaaacccgttcaatacagacaacgcacacaccagggccattgtagcgacaaccactccacagacagataccatcgaaatgatattgatggcattgtgggatttcttcgagaaaaggtaacgccgggctatataaaacgggaagttcaacgcggtattcttttactttttcaacagattatcaatattttcgatataatccagggaatcgtcgataaagaatgtcagttcaggaatcttgcggacctgtttccggatgcgctgtccgagatcaaagcggatggctttcgtattcgcccggatattctcaagcatttccttcgacttgtcggacgggaagatactcaggtaagcacgtgccacactcaaatcggggcttacacgtaccacactgacagagatcaggataccatgcatagcctgtgtctgtttctgaaagatatcactcagctccttttgcaggagacgctctattttacttaatcttgtactttccataatttcttgcttttttattttttccagatcatcgtaaggccgtcacgcaaaggtaagataactttttcaatacgcgggtcttctttgattttatcattaaaactaagaataccgagtgtttgtttatccttaggatgctcctccaccacatgaccgtcccacaacgtgttgtcggcaagaatcaagccgccggcacgcaccatcgggaaaacaaggtcgaagtattccgaatacaaccgcttgtcggcatcgataaaaacaaggtcgaaggtttcaccgagtgccgggataatatcgagggcatcgccgaaatgcacccgtatcttatcctgatggggcgactgtttcaggtatttcatgatgaagtcttccatttcgtcgttgatctcaagcgtatggatcaaagccccttcttccagcccttccgccatacaaagagtagcatatcctgtataagtaccgatctcaagcacacggcggggacgaagcatccggcaaaacatcttcaatatccgcccttgcagatgccccgacagcattcgcggacgaagcaggttcacattcgcatcccggttcagggccgagagcagtgcaccttcttcgtcactatgagaaaggatatattcgtctattgtcatcttcatgatttatgatttatgatttatgatttgcttgctgggatattaatcataaaccataaatctttgtttattccttaaacgtcggcaactgataattacttccggcgtccaataccttccctacattattaatttcaaggaagctcgtaccgccaccttcaccgaaactgccgctcaggtaagccaccatgtcgttacgggtgatgcgtccgcttttgatcagctcgttcagcgcatcatagaaatagccgcggcgactgtcgttataaggctggtgaacagcccagacaccgtaagaaagggacagcatacgcatgacacggggattgtagcagatcgagaacacggtggaagtaccgcggaatgcagccaggtaacgagccgtacggccggtatagctatctgtaataatagcttttacatgcagtttggaagatgatttcacagcctgctttgcaaggaaagacgtaacatccaagtcgttaccctcgatagggacacggatatcattggctgcaagtttcgtcttttctgcctcacgggctaccttcgtcatcgtctggacagcttcgacagggtattttccgtaggctgtttcaccgctcaacatcaaggcatccgtgcggtaatagatcgcattggcgatatccgtcacttcggcacgcgtaggacgcgggttgctgatcatggagtgaagcatttgggtagccacgataaccggtttctttacttccacgcatttacggatcaacacacgctggatacccggaatcttttcggctggcacttcgatacccaggtcaccacgggcaatcatgataccgtaggctacttcgaggatctcgtcgatgttgtcgacaccctcttggttttcgatcttcgcaatgatcttgatcgggctgttatgttcgtccagaatgcgctggatatccattacatcctgcttgtttcggacaaatgagtgagcgataaaatccagatcgttttcaatcgcccacaggatatttttacggtctttctctgtcaaggaaggcagattgatacgtacacccggcacgttcacgctcttacggcttcccaaggtcgcgtcgttctccacttcgcaaaccagaaaatcgtctttcttatcgattactttcagttccaaatccccgtcatcgatcaggatatcgctgccgacggtcaggtcattgacaaaattccggtatgagacacaaatacaatcatgcgaagtctccccttccgggtttcccacgatcttaaccatttccccggtcttgaactcgatgggagcctgcgcagcagtcgtacgcacttccggccctttagtatccatcaaaattccgatacggttagaaaccgtacggacattattaacgactctggtcaaaccttcttccgccatgtgagccgtattgaggcgcacgacattcattccagccttgtataacgcgtcgataaactcgacctcacaacgctggtcggaaactgtagcaacaatcttcgtatgctttaacatataacccttttttaaaattgacaattgacaattgacaattgacaattttaaaaacagccaatcctcaactccaagagccaaacctttattaaacttctttttacctaaacaaatttctatctcttcctaattgtcaattatccattgccaattgaagcaccgcttccaccgccaaacggtacgaatccagcccgaaccctaagatcacccccttgcaagcggctgaaatcatggacacatgacggaaagattcacgggcgtgtacgtttgaaatatgtacctccacaaccggagtcgttacagcttttattgcatcgtggagggcaatggatgtatgcgtataagcgcctgcattcataatgatcccgtcgtaatcgaagccgacttcatggatcttgtttatcatctcaccttccacgttactctgaaaataagcaatctcacattgtggatacttggcacgcaactcactcagatagccttcaaacgaagcatttccgtacactgtcggttcacgcttgcctaacagattaagattggggccgttgataatctgaattttcttcattttgccgtaatttattacctttgccctgtcttttacggacaggaaatatccggcaaagatagtaaagatttatgatttataatttatgaattatgaattggtgctaagtcattagggtaaaatccattacatgagcagattttaccggacgaaccttcagctcctcatacttccccgtaaatcataaatcataattcataaatcacaattcgtttcatgcaccgagagaatgacaaaatagaacgatacaaaacatacctccgtctggaaaaagcgctttcggccaactctatagacgcttacctgacggatctcgacaaactgacaaacttcgtcgaaagcgaaggcaagaagtatgcggatgtcacatatgacgacctgcaacagtttgttgcccgcctacatgatatcggcatccacccacgttcacaggcaaggatcatttcagggatcaaatctttctaccggttcctgttcctggacgattatataacaactgatccgaccgaattgttagaatcgcccaagatcggactgaaacttcctgaagtcctaactgtcaacgagattaacagcatcctggacacgatcgacctgacattgccggaggggcaacggaaccgggcgatgctcgaagtcttgtatagctgcggactgcgcgtgtcggagttggtttcactacgcttcacggatgtttatttcgacgaaggattcatcaaggtggaagggaaagggagcaagcaacgcctggtccccatctcggaaacagctatcaaggagatcaagaactacctgtatgaccgcaaccatgtcgcggtgaaaaagggattcgaagacatcctgttcctgagccggcgaggaacagctctgtcgcggatcatggtttttcatatcatcaagcagcaaacagaaatggccggtatcaaaaagaacgtgagcccgcatacgttccgccattccttcgccacccacctgttggaagggggagccaacctgcttgctatccaggagatgctgggacatgaaaagattaccaccaccgaaatctatacgcatatcgaccgccagttcctgcggaaagagatactcgaacatcatccacgtagcaagccgcgggattagaacagccgttccatgcgttcgatcagctcatcgcccaaagcccttttgacaacaatatgctctttgactgccgtgacaaagggattgctctcgaatgcaccgcgcacaccttcgaaatcttcctgcttctctttatccgaaccatccacaccgaaaccggtcatgaaagtaagggagaattctttcttcgcatctttataaagcagattatccaatccgatcaccgagtcttgccagcggcggacaagatcgacgatctgtgctgccgatattgatgacaggttcacaccgtaatactcctccagcatatcatacgcccatgtccattccatatcataataattggaatgcatggctgcaaagaactcttctatcgcctcaagcgaagttatcttgccttcttcaactttctcgatcaacccgtccaattcttcacgaggaaggatcaacccggaaagatccagccattccccacgaccagctgaagaagtcggtttcaactgtgaccagacttcttccatagaacagaaatccgttccttccaggcgcttgatcaaggagttccccaagaatttattgattgccataccataaagattgagggccgtacgcaaagaggaacctttgatacgagtattttgataataatagacttcggatgtctcacccaccaactcttgcaggttcttcaagattccgacagctttcatcatcttgtagatggtatacggactcagcaagttgtagttgatcatatccagccgttgctggtcggtacgcttatcacgcttcggccatttctgcgcatcgcggatcgtaccgacgctacgcaggtttacaccgggaaccaagtaagtctcatcgtctttctctatcagataagaaaaaggcatgtccgacgtatcgctatgatggtgatggcgccccattaccagagagaaagccccgacacgcgcaggccacaggatataggagtcactggtcgtcttggaacctctctccacaataccctggtggatggggcccagcttatacatatggttactttggttcgagccgcttccggcattcagaaacgaatacatgccggcaatcagtaggctgctcttatgcatcgacacagtaaaaggtcctgcaaagatagcacaagcctctccgttctcaaaagcgcagttgctgaacagaagtgaatcatgcgcagagaagttatgagtcacatggcacgcctgcccgataaaacaacggataatcttggcggcatcggcaaccacagcccccgaagaaatgataaaatcctccgcgataacgctgtcgccaatatacaccggagcattcgcattgctattgaccgtaccgttatcgagacgggtacagttttcgaccgttgcataatcggcaatcacagtattgcgcacagtccctgtattgattattttcacatggttgccgataaaaccatagttgccagtctgccgttcggcaaaatcggcaatcatcgcctgcaaacgcagtattaaagccggccgatgacgatataaagctatcagataggccaatgatgcagacaagccattataaatgggtacttcacggcctcccgtttcattcagtacggacacttcgacattgttcccgaaagaggaccttccttctacatacatcacgttcacgttctgtatgaaacaatcatcgcctatgaaataattggaaatataattgtgcacgttttcaatcagcgtattatcgccgatctcacaattatgcaaagttgcattccggataccgctatgtttcttcacccctcccggaagagtaaattccttttcaaaaaggcccaatgccacattccctgaaaaatgaacattacaaacgtgttcggcatgaaaagggctggcgacctttatgttttcccaattatcggccgtacagccgttcttctccaaatctgcaatttcttccgatagcagatgccttaaatatccttcactcattcttcatcatattgttggaaaagaaaatcgttataagggaaacgagtaatatgaatctgtttcacccgctcgtacagcaaggctttgagtgcatcgatattcgtccgtttcttggctgagataaagatacaattatcctgcatcttattcatccaagtgcgtttcaactcgtccaaatcgatattctcacgtgtacgcggagtcaggtcatcttcatccttcgggacaaaagtgaaagcatcgatcttattgaacaccataatcatcggtttctccgtcttgtcgatttccgataaggtacggttcaccacctcgatctgttcttcaaacgtcggatgagaaatatcgacgacatgcaccaacaagtccgcttcacgcacctcatccaaagtcgatttaaaagattcgaccagttcggtcggcaacttacggataaagccgaccgtgtcggacagcaggaaaggcagattgtcgacaatcacctttcggacagtcgtatcgagtgtcgcgaacagtttgttctcggcaaacacttcgctcttactaagcaggttcatcaatgtggactttccgacattggtataaccgaccagtgccacgcggaccatctttccgcggttcttccgctgcacgcttttttgcttatcgatctcgaccaggtcccgtttcagcttggatatcttatccaggatgatacgcttatccgtttccaactgagtttcacccggtccacgcatgccgacaccgccacgctgacgctccaagtgtgtccacaaacgagtcaggcggggcaacatatatttatattgcgccaattccacctgtgtcttcgcatgagcagtctgtgcacgacgggcgaagatatccaggatcagattcgtacgatccaaaatcttcacctgcaactctttctcgatattacgcaattgcttggcggaaagttcgtcatcgaatatcaccaatccgatctcgttttccaccacatattcctttatctcctgcaacttgccggaaccgacaaaggtcacggagttcggataatccagtttctgataaaaacgtttcacagcttcgacacctgccgtatcggccaaaaaggccaattcatccagatattccttcactttctgctcattctgttcaggagtaatcagtcctacgagaacagccttttctgtctgtgcttcagatataataaattctttcatacggcaaagatagtaaattcaattatttatgtatatttgtacccataatatcaaatcaaaatagtattaactatgaaaaaggaagtcatacattttgttcagtatgtacttgtaaagattttattcttcggtgcagcttatccgctccaggcacaagtttccaatccatcctcatgggaaagttttgtcggtagcgatgaaaataggcttgtttcggatacgctcagattgcagacattcggggattcagaatgggataattggggatatacgttaactgtaaattcttctcttatccaagagaaacatacgataaagatacctgtcggttccggaatcattttttcccccttctcgcttaataattatacaaatgtaaaaatcgtatcacatattgccggactcaaactagaacccggtgagttattattatttaacgttcaccgtaataattccgatgaagtcataacaggaaacactcctgaacaaggtaaagattacatgggttacagatatcttacaatcggaagcaatccaagctcttttgctataacgacaaacaaaaaagtcaatacacagaatggatattatatgaccgatagcgtttttgcttatggcgacatcccttcatattctctattctctggtatcggaaactggaacgacacaaccctttggtcgcatcttcctccactccgccacaggaatgcgctcataaaagggaatgtaagtataacaacagatacgtattgcaaagatatcgccattcattccggatcactggagatcaatcctggcagcctgtttatcctacagaatttggacctatacgaaaacaaagcctctctccattcaggagggacaatacttctttccggccgtatcaccttccataaaacttttgaagaacccggcaaatggtattttatctcatttcctttcgacgtttatccgcctggcatcgacctccacttcgaacaaaaggatgctacgcctaacgacggaggcaactatttttatgtccaatcctacaacggagacaagcgggcatcgtccaaccaatctgccgggaattgggaagtcgtgcccatccgtcccgataatgtccccctgttcgaaaaaaacaaaggttacctgatcgcattagacgagaaaacgacaaaccgaactttatctttttcatctcgacccggcgacatccccgaaaattttgccaatataggagctattgcaattcctttaaattccgacagttcttcaggcaatcaagaaaaccacggctggtatttgtgcggcaatccattccccgcactacttccattaacccaaatcgaaaaaaacaaggctttggatggaaatatctatgtatatgacggaaacggttataaaacctattcccttaatagcaactatgccctccctcctttcgccgccttctttgtaaaagcatcaactgaaactattatcaatatctccagtcaaagttcatcaacacaaccaattcaaactattcaaacagatcttcctataaatatcaaattttcagagccatatactaacgatcaaaatacggatacaaataatccaacaatatcagactttcattttttcataaaaggaagagaattgcaactacacaatataccccaagctggatggattagaatttacgacacatttggaaaaactatttatacaagaaacattcaaacaggcacctcctttttcacattacctaaaaaaaacggtttttttttcttacaaatctatacaaaaaaggaatatatcacctctaaaatagtgattcaataataaatcaaagaaattactacataaagacctgtttctgattattaaataaaatacagaaacaggtccttttcacattctataaaactattcgaatgatatcaactcttttacaatacgattatatcctttttcattgagatgagttccatctgtaaacagacattcatcaatacaaccattatccaataaaagcagcctaccaggatcagaatagaagtatgcatccctttcagctattctcttcaactgtttattgatacttttaacttggtgctcttgatttctacaaggtaataaccctacaaccttaatatcagccttaggttgccgaacacgtatttctgataaaagaaatttaatacctttaactatatcttcctccgaatccaaccctacattattaatacctatcataacaactattttttcggcttcatatccttccagttctccatggtaaaccctccaaagaagattctcaatccgatcccaagcacaccccaaattcaaataacctcttggattcatttctttctcccaacattcagaaccatttttaatatcacaactaggatctcctccccaataatgagtaatcgaattaccaagtataatggcttttggtttctttttacaaactaaatcgacaatcttcaaatgtctgtccaaccattcataatcgacacatcggcgttgagtaaccggacaagtcgtagaagatgtactggagggtatattcagaatatcacggaccttcatttccaccacatttgcatattgactcatgccaaagtcattaggatgaactaaatcgacccagctatccatcgacaaattcagttcctcacgagataaataatagatttcaggaataccttctgcagaaagttgttcataagcttctcgagatccagcatttacatttgccacataagaatattgcaacgtatccatctccatattacttgaaccagcgtgttcaagcatcaatataggaacggaacttttttctcttaacttcttaacacatgataccaatcgatcaatcaaatcgttcctagacaaatcatatagattaggcaaacaatctaaaatatacaaacgagcattgatatttccaatcagaccaataagttctttatccatagttcctttacctgaaaatcctaaattgaccaaaggataatctaatgtacgttgtaaaatcgtactccaagccatagcagatctcgaagcacaagccccttgagtaatagatgttccataaaggactatcggcttttcatcagaggctgggataaaagttagatcataagtatcaagaacacctatttccatccattttactcgattatacaaaggcaaatatagcctaaattcatatcctttatcatgatatttattttgaggaaatctagaataagaataaatcactgtatcctttaaactatatccaccaaaacaataataccattttccatcattgtcgatgcaataaagatctacacctgtcactcctgttaaaggcatatgtggaaaacttaacggatccgaaaccatataacgtacacaaatttgagggctattcgtataaaaatggattgccaacccagccgattgacatgctaaattccatactgaagtagaaactatctttttagccttacaaggtaaacgcccatacaaatattcatcacttctttcaaaaccatagttttgaactaccggataatttacttttaaaggattatgccatttcaattgagaatgagctgatgaaaaaaaatataaaaaaatcaatattacatatataatgcgttgatacgaactcttattcataagactttgtcaataaaaaagttatttttcttttattatctaccaatttaaacacaccaccagatatagattctacatttctatctcgtacttccggatttaaatattcagggattctgattttcttaggtaaaacttgttccgaaaacagttccaattggcaatgcttatcatcaatggcttttacaaccagattcacacatcctgttaatgtatataaatttttaacagtagttatccgattagaaatcaaatactcaaaaggaactcctcccaaaatagtaacttcatctttattttcaaaataaagagcattcagcatcatatcaataatccgcccattaccacttccgttcggctgccaaggtgcaaaagccggatttcgtaaattaaatcgctcttgtgtctgatgtgcatcatgagacataccatattttaaacaggtttgaagtgtcataaatgcttttttccattctcccaacattaaatatataggttgccaataatgttcgcattgaattatatagaaaatttcccgatccattttccccataaaataatctacagccacattattttcataataatcaatatattttttaaacaactctgattcgggagagattatacccaccgttgcaataggagccattatatctgtattgataaatttgattgcttcttgcacattactatcatctgttgttatctttcgatcaatgtagccgttaggttgtgccaaatgtttgattgtaaacaacaagtctgatcgatattgttccaattcttttcgcatagaaacagcctctgcatgtcgaatactttccaaaaacaatacggctttctctaatccccaaaaagaaaatatatctgttgcacttacaaaatatccagcatctccatctgaagccactgcaaatggcattaatccgtaagtcagcggacgagaaccatccgaatttaacacacgagttgctttgatttcccctaaaatccaatgcactgctttcaaaattttagacaaataatcctccataaattgctggtcttttgaataaagataataatcacaagccaacgctaatgccatacctgtagtattagcccacctcggccccgttgtaccaattgcaccagatgttgttgtaaatttaccaacaggaggaaagcccgcatcctgtaatgaaaaaatataatccaaagatttctttaccgattcaaattgtccagttcttagcataggacgtaacatctgtacagcctcaaatacccaaacaaaaaaacgctctgaacttccaccttgagctggctgatacattttattctgaaaatcattgaccaaaagctgtaaagtacttaactgtaaagaacaaaataaatcttcccactcatctcttttaaactcagttttcaatgttttatcagtaaacggaactttaaaatcggcaatcgctttttctttaacatccttaaatgtcaattgtttcaatgactcttcgtgaaaagaggttattaaagaatcattcactaataatttcagaacaaaaaaagcagaatcatttggttgaacctctttcatagcacaaactacacgatgcatatcttttacccgaaattcaggagtgacataccccgatccataccacacttgtggatataaaatatcttcatattctttatcggtgtaagatttcttctcttcccaaaacagattcatattctcagacacaacttctcctattaattgttgtcctttatagatggaatgttctttcaaaactacttgatcataatctttccatttttcattagtccaacgataaggaatgtaatgataatcaaacatcttattttcagaataataaccaatcttactccgaatcataatttgtttgattttatcactttcattttttgcccctactcgcaaacatagcaaagtttggctatcgtctaaaactgtagcagcatactcaattttataataaatatcatttgcgaaataatcagcagttgcaactggatacttatcctctgctaatcttaaattggttaatctaaagtctggtataaatggtggattatcaaacgcaaattggacgaccaaatcttcttgactttctgcctttttacgctgttcaaaattagttgaagatatatttcgaataacatgcctacgagaaaccaccatagaaggatttaaataaatccaatccgaagaatgtaacggatgaatcaataaattaatcgtataagggggatgccatttatactcgttttcttcaagaacttgagaccaactctttttttctaacaaaggataaagagcttgctgtgcgtctgtttttccatgtaaaaacatagaaacaaaacctactatccatatataaaatttatattttcctctcattatcttatagatttattctgacacaaaagagagaagggaacaactactcgtcccctactctttgcactcgctctaattatttccaaaaactaatttgcgtcaaattggaattaataaccatatcctgttcacttataggataataataatgctttggagattcaaaggtaaagacattatcttttcctgcaggcttaatacaccctttagtaccttctgtcaaagcgacttgcccgtcctctataacataagagaggataccatattgagcaatttcatctgcatatttttctttatccgcattagtcgcgacaattaagacatccggaacattatctgcattcaagtcatataaaccaaaatcagggaaataaataccagcttgtatctgactaaaataatcaccacatgaccaccgcatcaaatcatcatagcggaaaccttcgtcggccaattctactcgtctttccctacggacttcaagaattgcagctttttgagaagacagtacattgggatatttttttaacaatacaggatctacatttgcctcccaatcagctaatgttgctcttggaactttcgcacggtcacgcaataaattgattgtattatccaaatcggtttgtgtcaatatacctaactcagctttcgcttcagcataaattaatagaatctctgcataacggaatataggtaaatcactccaacaaattgcagatgcggcataaccattctgattagtaggtaaaccgtcatacttctttatgccatatcctccataaattaaattcggaatacgaggagacgtccagttcgtacagacatatcctggagtccaaaaagtagcctctaaacgagaatctctattcttataaaattcatcaaaactcatttcattatatccttctacagatgtgaacggtttggctttatctccatcaatatacaaataggtttccatcaaatcacgagacaacataccatgtccttcccatgattgattccaccatacacggtttggatctccataattgaaatcctgatacataatcatctccggatttccttttaaatcattatttctaaaattagccgcataatcaatatttaaagaaaaagacccagatctcattaactcttcacaagcggcaatagcaatttgataatacttatcagcatcattcaactctaattcagcatgatatttacgccaagaagcctctgacaaagcaatccgagccaataaagccaatgccacttctttagaaaatagtgtacggtctgtatttgatttcatattaaccactgcaaaattcaaatctgccattacagaatcaacaaccaacgaacgagaatcctgtgtcttataaagaagatcttcatccgtcgtctgtaaatctctactataccaagggacatttgaatatcgaagaactttatcataataatataaataagctctcaccattctagcaagtccaacaaaatgggcagtctcttcccctgatacatttccagatctggctatcataaaattaacatttctaatatcagtccaattccactgagttgcattcgaaggcaaaataccgcctgacatcacttgaaaaagttcatcgttcgttgtcggtgtacaaatattatctgacggataatcatatcgaattgactcaaaataacgataaaactggttggagtaaagttctaaatcagaagaagtcttaaagaaatttgcctccgtaacatttgtttctggataacgatccagaaaatcatcattacaaccgcttgacaaaaccagacttaatgcaacgatactaaataatatttttttattcattttcatcttctctaaaatgtaacattaataccaaatgaattatatctctggaaaggatatctatttgctcctaaattttccggatctacactatagtcgctatacaaaccagataaacagaataaattatcgccagaataaaagatcctcattctttgaatagacaatttagatacccattttccaggcaaagtatatcccaacgttaaattcttcaaccgaatataagctgcattttgtaaataccgagtttgtggtatattcatttcacgatcggcagtcgaagcattacgatgacttaataccggccaataagcatctaaattcggattatcttctttccaacgatcaaaataatgcccctccagttgatcaaaccaaggagctgaatatttaccccaaaaaattttatcacttgcagtcggataataattatgcttcatgacaccttgaaaaaacgcactgatatcaaatccactccaattagcagcaaaagttgcaccaaaacgataacgaatttgatcatttcctatcactgttaaatctccgtgatcatccaacgtatacttaccacgagtgatctttccatcattattcaaatctttatatttcaaactaccagccactgtaggatactgagacggagcaatcaatatttctgtttgatcgggtcctttttgggcctcttcatcagatttatacaaaccatcagatgtcaatccccaaatttcaccaatcttctgccctttataataagaatttaaggttcctgtcggattagaaaatttcgtaatctcagatttgctatcagataaattaaattctaagctatactctaaaggcttacctgctaatttaatttgatcacgccaactcaccgttaaatcaaaacctgtagttttcaaatctgcagaattttcttttggtaaattagcacctaatacccctggtaacacttctcctaaagttaacatgtcttttgtatttctacgataaatatcacctgtaaaattcaagcgattatcaaaaagagttaaatctacaccaatatctgctgttgttactttttcccatgttaaattatttgataccaactctggagcacttacatacatcggtaatttaccacctaaaatcaaatcagactgagccactgccattgttgccatataagcataagcatttacatcctgatttcccaactgtccataagagcctcttatctttacccgatcaaagatcgttctcaaaggttggaaaaatttttcctctgacaatacccaagctactgatcctgatggattaaaaacaaaacgatcatcatgaggaaaacgtgatgttccatcataacggccattaaattcaaaaatatacttattatcaaaaatataattcaagcgtccgtaagcaccccgcaaagcccatgtttctatattttctcccacagtcggcattccatatgctaactggacactcggaagattctgagaaaccagctgtgtttttttcatattcagctgtacataacgataatcttcttgattaaatccaaggaccgcactcaaagcgtgtttttccgcaaaagtcttatcgaaattagcatatgcatcataagtcatatgtcgaaccgtaccatatctattagtcattgaattaggagtgttccttttagaatcaaaaattccaggagcaacatatacatcataagacaatgtactaaaatctgtttttacgcgctgtatagagtaattaaactgcccgtttaatgtcaatacatcttttagtaaatctattttcgttgtaaataattgagaaaaagtatcatcatattttttagcctgacctccctcttcaaaatcaccataactactattcaaatcataccaatgtccatcagaagtttgaacaggagctacagaaaccccaagttgagtacttaaacggtaattatccggatcagcatatatcagataggcagaacttgatctatttaaacttgatacaaaagaggaattgcttccaattttccaccaaggtgtcaactgaatatctaatttagcacgtatattatacttattataatcaaaatcaccaaaacggatcattccatcctgataggtataaccacctgaaatataataattcaatttttcagtttttcccgatatatcaattgtatgattggtagaaaatgcactttttttatagaatacatcatatggattattagccaatacataaaattgttgccccattgtcggcatccataatccatccggattactacgatctttcatgtaagctttagccacatccaacaattcatttgcaaaaacttgagcaccagctccaatattccaatcattatagaaatgataagaattcaaaaatatatttggtttctctgttaagaaccgtacagagaaattattattataattcactgttaccctctcggtctttcctgtttttgttgttactaaaataactccataggcagcccttgacccataaatagcagcggaagctgcatctttaagaactgaaacatttgcaatatcagcaggatttaaagtattaagctgattcgcatccgaaataaccccatcaattacaaccaatggagaaccaccattaattgatgcaaaaccacgaatattaaatgatggcaactcattaggatctccactagtaggatcaacattcaaacttgccacagcaccttgtagggcctgaccaatattagaaacaggtctatcttccaattttttggtatcaagtgtagctacagatcctgataaatttgcttttttttggacagcatatcctactacaactacttcatctaacagttccatatcttcttgaagttccactattaaagaagagctaccatatactccaacttctttcgtctgataaccaatataagaaatttgtaacgtacttgtaggatcaaccgataaaacaaattttccatctattcctgtgataatcccatttgtcgaacctttctcaataacatttgcacctataatcggttctccatttttattaacgacagtacctaatattctctttttcccactttgctgtaaagattcaattcgcctatctccttttttattactggaaaggagaacataacgcccatcaatctcatattggatattcaatccgccaaatatatttttcaatgcttcctgtaaatcgagttttgaaaaaaataccgatacattacagtcaacatcgacatttttgttatagacaaacaaatagtcagtctgtttctcaatctcattcaagacattctcaagtcgaacatcatttttgtgaatcgttacactgacattttgtgaattagaattttccgcatggaggcagaaaataaacatgaataacaataaagtggttattttcatggctctaaaaaagtgtttacgtcggaatctttttatcaaaaggatatccggcaaagattttttattcatatctttgtataagaagtttattaatacagtttaattaattgtgttaatcgaatgccgataagtgtggggcacttgtcggcattttatataaaggttaactaagattttataccataagcatttgatttaaaattaaacattacttaatataaataacggactcatcgttgttccgctcaaaagaatatttcgcatctttctgcaaaatgcgtaacgcgttatctatcccatctgaaatacgaaatttaccactacagatataattgacaagatgtttgttttctaccacaattcgtactccataacatttctcaaaacgtagcatcaactgctcgaaattcatattccgaaaacaaatcaatccttctttccagcgaaaaacatcaaaatccaatattggagatgtagacaattggccattctccaaagaaaccatatggttaggggacaataaaacggtttccgacggattccccttatccgatacccgtaccgaaccttccatcagtgacgtacagaaatcctcggagtcactgtatgcctccacgttaaatttcgttcccagcacctcgacattacatttgttcgtctggacaacaaaaggtttgtcttcattgtgagttacttcgaaataagcctctccatccaaggttatctctcgcttattgcccgtaaagacagccgggtagcgcatttcggaacgggcattcaaccagacgttcgtaccatccggcaaagtcaggttggcacgttgaccggcaggaaccttaatcgtattcattgcctctcctatcttcctaatttccgacttatagaaatacgttccgcaggcgacggtaataacaaacacggcggcaatctttatggcttcgaacaaaacagtccggaagaaaggatgggatttcttttcctccccggccgattttgtgctgcccgacagaatcattgcatcgaaaaactcgcgttccctaaaaagctcctgctcgttttcgggagaagattccagccagatacggacagcttctttctcttcacgggaagcttttccatcaaagaatttatatagtgtttctttttccatttttttcgtttctatttataaagcaaataagcaggaaatatccctaacggaaaagggatttttttgagaaaaagtttcaaccagacaccatgcacttggaatttgcccatcatttttgcttatttatcgcctgatatcgaaaatttttcacgccagtcggacttttgtcgacaaccgtcagcagacttgccgacaattatcgacaggcaagtatcagcaaaagaattttggcaggaaagccagtaaagggaaataatcttttaaagctacacgcaagacttttaaagccttggtaatatggaactccaccgttttcgtcgagatacccaaggctaccgcaatctccttatggctttggttgttgtagcggctgcggacaaagatgtcacgtgtctgttcgggtaatgtttccaacgccttatcgacaagcgactgcaactcgtcagtaaacagcttttcaggattacaagcttcgagggtagcgatgcgcaggttcagttcccaagtgtcacaatccttcaaatactcgactatctcttctcgagtacgcaaacgttgcaaataattcaggcatttgtgcttgatgacggttagaatataggccggaacattcgagtcaggtgcaagttttcccctattttcccaataatacatcaggctttcgatcgcaatatcttccgcaaccatactgtcgcctacataggtgttggcaaaatggacaaaacgacctttatagtcagtaaacaactgattaaaagaatatatctcggatccgcctttcatacatatagaatcaaatcgccgataaagatatacataaatccggcttgtccacctttcttgtaggattttccagcatttatccgttaaatagaaacaaaggcaaacataaatcatattttttctctaattttgtatttaaaatacgagagattcgatgaagaaagtaaacataacaactgctgttctattgatttacctgatcgttatgagcataatcggttggcctggcaaacaagtcgatcctgattatgtacagtatttcggggtaatcgcggcgactgttcttgttatcggcctattgcgtttcctgcagatcaaacggctgaagattcgggataagataaaagacggaaaaaaggaataacgaagtttaattgcaaatataaaattctaattcatgaaggaccttgtgatcggactgtctctgttagggatggtcagtgcgtgcatccctgcaccccaagcaaaagacaatgtcgaggaagactattgccagtatgttaatccctttatcgggaatgcggacaacggacacacgtttccgggtgcttgtgcaccgttcggactgatacaggcaagccccgaatccggagttggctcttggagatactgttcgggatataattatgaagataactttatcgaaggtttcgctcaaacgcatctgaacggaacgggctgtccggatttgggcgacatcctgctgttcccgttctgtggcgatatcaaagacaatacttataaaagcgaatacgacaaatccacccagaaagcatcaccgggttattatgcagtcaccttatccgactacggtgtcgatgctgaaattacagctactgcccacacagctctccatcgctataaattcaacaacgaagggccggcacgtctgctggtcgacctacaacgcggtatggtcggaagcaaggatgcgctgaagacacatgtcttagaagccgagcttgaaatgccggacaaccagacgatcaccggacataaccagactcgtgcttgggtgacacgccattatttctatgtgatcaaattcgaccgtccttatacggtcaaggaagaactcccggtggagaaaggagaaaaggcgaaacgcctgatactagaattcgacacgaaaccaggtgaagccgtacaggtgaaagttgccatatcgagcgtaagtgtcgacggagctctcgcctccttgcaaaaagaaaatccggcatgggatttcgatgctgtccatcagtccacacgcggccagtggcaggcactcctttcccgcgcacaagttacaggtacgacggatgaaaagacaagtttctacacctccatgtatcacttgatgatgcaaccgaacaatattgccgacattgacggacggtatcgcggtatcgatgacaatattcatacgtctccgacaggcaaatactattctacgttctcactttgggatacctatcgcgccgctcatccgctatacacgattctgaacccggacaaggtagacgccatgatccagacaatgctggatcaccagaagatacaaggttttctcccgatctgggctttgtggggaaaagagaacttctgcatgatcggcaatcacgccattccagtgatcgtggatgcttatttgaaaggattcaaggggttcgatgcagaagaagcttaccaggcagtcaaagcgagcgctaccgtcagccattttaactccgactgggaaacattcgagaaatacggttatttcccgttcgacattatcgacaccgaatcggtatccaagaccttggaatgtgcttacgacgactattgtgtagcccagatggcaaaagcgttaggcaagacggaagattacgaacgtttctccaaacgtgccgccttctataagaacctcttcgatccggaactcaagctgatgagaggaaaagattccaaaggcaactggcgtacgccgttcaattccttcctgctctcacacgccagttcttcgggcggcgatttcacggaaggcaattcttggcagtacacttggcatgtacagcacgacgtacaaggcctgatcgacctgatgggtggcaacgaggctttcgtgaccaaactcgactcattgtttttcctcgaaagcacagccgaaaacacaggtttcgtttccgacgtaaccggcctgatcggccaatatgcacacggcaacgaacctagccatcacgtagcttacctttacagctatgccggccatccggaaaagacacagcaggtgatccgcgaagtcttcgaccgtttctacctggcccaaccggacggtctatgcggtaacgacgactgcggccagatgtccgcttggtatatcttctcggctatgggcttctatccggtcaacccgatcagcggggaatatgttttaggagctcctcaaatagaaaagatttccctatctctccccgaaggcaaaacattcactgtcgaagccaaaggtttgtctaaaaccaacaaatacgtcaaatcagtagaactgaacggaaagccggtcacaggtcttacaatcagccacaaggatgtcatgaatggcgggaacctggtgtttacaatgacagaccaaccaggaagataataagattcagaacagtgtgtcaaaatgtacttgtccccgaacttgacgcgggaacaaggtagttttgacatactgccctgaattatgccaatcagcaaaccgaattcagtcttgcatactttctcttatctggggacaacggttgttacctccttgaaggcataccttcgccgctccccatcgcgcaattggaggatcagatggccggtcggctcgatggcatggatacgggcttcgaaagagccgttttcatcaatatagaaataataaccgtcaccatgatataaggccgccatataggcagctcggatttcttcctccttctcctgtaataataggaaatagtagttaaagaagatacgcaggaagcaggccaatacgtcttcccggtcatacgtcttacctgtaatctgagtcaaggatacgggattgggggcatcactacgaaatatttcctggttgatattaagcccgataccgactaccgaacaatagagatgctgcccggacagatcattctcgatcagcattccacatatcttacgatctttccagtaaatatcgttcggccattttaccgtgacggaatccgtgtacttctccaacgtttccttcacactcagggaagcaatctgggaaatcaggaattgtcggttcgcaggaaggaaatcaggatataaaagaatactgaacatcaaatttttcccagcttccgactcccatgagtttccgacctgcccctttccggctgtttgaaaatcggctatgacgaggctaccttccggcaacctggcttttgcactttgttcccgcagatagttattggtcgaatctgtctcgacaagccggatgatcttcggagtttcgtttttgtcattcattttcgtaagcttctcttattttcttcggtaatttggcgatcacctcgcgataagaatgatggatccagtgcttgatctcgctgtccggcatatcccggtctaggtagatggtgttccagtatttcttgttaaaatgccaagcaccttccactgccgtatatcgttcgcgcagatcctcgacataatcggtgctgcatttcagtgacacacagggttccacggcatccagaggcaggagcaaaaacatcttcccctccactttgaacaccagtgaaacatcatcgaaagggaaacactccgtcacattcttcagcgacaggcaatattccctggcttcttctatattcatactgttctttgttttatttgcggcaaggagcatagaaagcatcttctatatgatctatttcagactcctctccttttttgattacggttatgatgtcaaaacggaccggtagttcaagattgaaaaagcggacatacgcatcggctgccgccacgatacggcggattttaggagcatcgaccgcatcttccggcgccaaaagataatcatccgaacgcgttttcacctctaccacaaccagccaggtatctttgactgctacgatgtccagctcataatgatgccagtgccagttcgtatgggtaatcttgtagccctgcttttccagaaaagcacgtgcaaccgactcaccgtcttttcctgtttcgttccgtttagccattccatgtaatttgcacaaatatactgtttttcttttttatttgcgctttcccccttacatttgcaaactatgacactgaaacgtaaatattcatctccacagccgaatcacccacgcgtgcacaaggtcactttcatgctcaacgacgatgagcagaaggcagtggaacgttatcttgccaggtataaaatcatcaacaaatcccgttggtaccgtgagacaatcctgtcccacatacttaaaaccctggaagaggactatcctaccctcttcaatgaaaacgaaatgagaagatgatcgatccattcaacgacgaatatttcatgaagcaggcactagtagaagcccgctcagcagccgaagagagagaagttcctgtcggtgccgttatcgtatgtaataaccagatcatagcccgcgcccacaaccagacggaacgtctgaacgacccaaccgcccatgccgagatgttagcgataacagcggcagtcggcgtcttaggagccaagtatctgaccggatgcagcctttacgtgacggtggaaccatgcgtgatgtgtgctggagcaatcggatggtcgcaactaagcaagatcgtctacggagcgacagacgaaaaaagaggcttccagcaatacgcaccgaaagccttacatccaaaagcgacagtcaaaaaaggggttcttgaaaacgaatgcgccgaagaaatgcgcaaattctttcagcgcaagcgctgaacaacttatttcacttcctcataatccacatactccccctcatcttttgcaaaaatctttttacgggagacctgcgaagcatattcttctcgtgcagagctgttactgcgcgcgtcggaagagtaaccgcttgtttgacggcgttgttcacccttctttccactacttccgcttccgaacaggatatttttaaaggtacgcaagatagagaatcccattagaaaaactaacaggataaagaagaagaacataacaaacaaaaacttaaacatattccgtcacttagttggtttattacacaaacacaaagatacgaactcttgtttaccttcttttgttaaaaaaagacaaggttatatagagaatgactgttccggcaatgcccagaacaccaaagaaagtcacaaagaccaccgccccggccactaaaatatagcgtaactcattgcctttccatgccaacgactttactttcaatgagaacatcggaacttcagataccagcaaagacgaaaacaggatcgccgcaactatcgttccggcaataaacccgatgctgtccactggtacggcagaatggaacgcatagccgatagacgcccagaaaagagcatgggccgggacaggcataccgataaaagaagtcgtctgcctttcatcgatattgaacttggcgagacgcaacccggaaaagaccggtatcaccaaagccatatacggaacatagcctgccgcctctcccaaaacaggagccgtcatacaagcctgctccaacaaccaataaacgatcattccaggagcgacaccgaaacttaccatatcagaaagagaatccaattctttccccatcggagagtaggcgtgcagggaacgggcggcaaaaccgtcaccaaaatcgaaaacagccgcaatgacaatccacaaggtcgccatcggcaagtttccccttaacgccataatgcaagcgatacaaccagatatcaggctgcagcaggtaacaaaattaggtatactattcttgatgctcatttatttctcttattttcccaaacgggctatcggagtctggttaccggtaaccttctgatccatttcgaccaggacttccgtcccgacaggcaggtaaacatctacacgcgaaccaaacttgataaaccccatctgttcgtccacatggcacttatcaccgactttggcataggtcacgatacgtcgtgccaacgcacctgcaatctggcgtgccaatacatccaccccgttacgggttgtaatgacaacagccgaacgctcgttctccgtgctgctcttcggcaagtaggcggcacggaaacgcccgttctgatgtgatacatgcttgacagtcccattcaccgggaaccaattggcatgtacattgaaaacggacatgaatatggatatctgcaagcattccctgtgcaggatttcattctccatcacttcctcaatcgccacaatcgtaccatcggcaggggcgatcaccaatccttccgaatcgaacgggaaacgacggaacgggctacggaagaagttaagtaccaacaagaacaggactgtggtgacgaaagtcgtggtatagaacacccaacctctaccgacagtatgatacagcgcaacgtccacgacaaagaatatcgtgaaaagcgttaataatagacctgttccttctttatgtactttcattctttaatctaatcgagtatttatcgtaagaatttgcaaaaatattcatttttaccgaataacaaaaatatatcaccctttcaccgcttctattttgtttaattcaacataccaaaggaaaccttcaacctcgtcataccccatttgccggatcagtttcaggtagttccttacctgactatgatagcgttggtcggcatgttccccaaacttatagtcgaccacgaccacacggtttccggtaatcatcacacggtccggacgcttggacagcccttttccgaacaggatgtcgacctcgttcaacacacgtgccgtaccgtcataccaggaagcggcttccggcaggttcaacaactcttcgaggcgtgcgacaagtgctatcgcttcctctttgtcgatcaccccttcctgatggtatcgttcgaccgattgcggaatatccttccgggtacggatacggctcaacacctcgtgcatcaaagccccatgtttccggcgggcattatcgaagaaatagcctttgccatgcaggcgcaactgcaaacggtcgtccggagagatggaactaaggcgtgccatcccgatctcctgaatgtccccattctcctcctttgcaaccggatgccaccagtcgcccaactcgaaaacgcccgttccggtatcgaaagcggcaggtaacgagatcagcttctcaccctcccgtgtatcaggcatatccgtgcgcagaccagcccacaaggcatcggtcaaagtcgaaatcttttccacttcaccagttgcatccttcatcttcttcgggcgcggagagaatacaatcaactcatctttcgaacgagtaaaagcgacatataaagtattcaggttatcaataaaggcatgcaagcgttccttaaagtaatcgcctgcaaaaatcgtctttcccaacgactggccgtagcgcacgggaaccagatgcaggcgatcaaacggcttctcttccggatggcaccagaggatgactggttttgtcggtttatggtcgatctcccaatccccgaaagggatgattacgactttaaagcccaaccccttcgacttatgaaccgtgaggatacggatcgcattctgtccatccggtgtggcaattgttttccggcagcccgtttcgtcccaccatttcaggaaacggttcaggtctgcgctctccttctgggtatattcggacaccatatccaagaaagcctggacaaaaacctgctcattttcgggaaagtcgtcggcaaaaaggcggaacagaccttccgttatttcatagagggactggcgggaaaggatttgcaggacagagacgacttccggtggaaaagccggagtttcgacaccaaatctccctttcaacacttgataggaatataaagcgatctgctcgttcgtccggtcttcggggttcttcaggtaacgcaacaaagaaaccatgaaacggactgccgtcgaaccactgacaaacagagcctcatccgaaataatatcgtagttgtagcggttggaaggatgctcttccttataagccagtaaagtatctgccacctgtgccccttcctgattggtgcgaacaaggatagcaatgtcttttagcgcatatccgttatcctgcaatttctccaacacgccgggcaaacgtccgagagcttcctctttccaatctttctcattatctccggagagaaattcaatccgtacatgcccgtctttctgcatgaaagggggaggaacctgttggaaacttttatcataggcggacatgatcttagtgaaaaaaaacgctcgttgttcctcgctcagggaagagacggacagcgcttcattatagacagcctgcaggacacccggaagtgtcgtaaaaagggcattgttaaactccacgatattccggcaactgcgccagttatccttcagcgtctcttcatgaactacttcaggagaaaagtcggcttgcacctgttcgtccagcaacttccagtccgagttacggaaacgatagatgctttgcttcacatctcctacgatcaaattatcccggctatgtgcaaggctctcttcgatcaacggacggaagttgttccactgcattccgctggtgtcctgaaactcgtctatcatataatggtcgacatgtgtaccggttttttcatagatgaaaggagcatcgctgccttcaatcaccttactgagcaattcggtcgtgtcggcaatcaacatcacatttttttcttcccgataagcggctatctggcgggacacatcggtcaggatccccaacgtataataataacggacaatttcacgggcggtattataggcagtcagattaccgaacagggaaataattcctttgatgcaatcgttcaaaccatcctcaaaggcacatccgatgatctgccgggtaccgagcgaaaccgttttcgtgaaacagccgtccagattatccgccaaaccgataaaagtagcggacggctctttcatctctccctgcaccagacggtcgagaagcgtcagaggcgaacggctgccccctttaaaatcggtaactttaagcccatatttattcaggatcgccaggccgcgttctcccaattctttagcggtcgcttctaccgaacggatgatgccgtacagctcgttcttgtagtcttccagcgctttcttgtcctctatatcccggccgaccgcttcactgaaagccttatagctctccttgaagacctcacggctcagggccataatatctttacgcaggttccattcccctccgctctctatcttatcctccgcaaaccggagcagccagcctaacaagtccttgctttcaggcttttcgaggtcggacagcaggttgtcgatagccgtcgtgagcaccagttcctgatccatttcgatcccataaccaccttgtaaaccaatctcgcgtgtaaaggcacgcatagtttgctggaaaaagcggtcgatcgtactgatgttgaacgccgaataatcgtgcaggatatcgatcagtatttgggccgcctgtttgcgaacctggatttccgtcaatgaataggccgacttcagcaattccacataatccgatttccttccggaagccaagttgtacagttcgtcgacaatacgtgtcttcatctcgtctgtcgccttgttcgtaaaggtcacagcaaggatacggcgaaaagcgcccggtcccgtaaacagtaaagtcagatattcaccggtcagcttgtgcgttttcccggctccggcggaagctctgtagactgtcagcatacgatcagattatacgacttttgacatagccttctttttgcaatatttccagcactttaggacgcaggtcaccctgtacgatgatttccccgtctttggccgagccaccgacaccgcatttcactttcaaaaattttccaagtgcttccaaatcgccggtcgttccccggaaaccggttaccaatgtcacggccttgccgccccggttccgcttatccaaagcaatgcgcagcagctgcttctctttcggaagcgtttcttcttcctcttcgtctcctgtattatattgaaaatccgggttcgtagaatacatgatccccagacggtccttccaatcgttactcttcatatttcatcttttctttatggggtcaaatctacaaattaacggcgggataaacaagatacaacattagtttcactttgttacccgtaagtgaaacccttgtttcatgtaagagaaaataaattatcccttacatgaaaataaattttcacccaaggggaacttctaaaactattatagataaagacctggaagcggtagactatttctgtatcagcaccgttgcatatgcagctattccctcctgtcgtccggtaaagcctaacttctcggttgtcgtcgccttgatggagatatcttctacatctacttggaggacgtcagccatcacccgtttcatttcgggaatatgtggattcagtttcggacgttcggcggcgacagtcgcatctatattacccaatgtatatccggcatcacgaagtaattccattgtatcgaacaacaggatcttgctgtcgatgtccttatattcacctgccgtatcggggaaatgataaccgatatcacgcatattagctgcgcccaacagggcatcacaaatagcatgaatcaagacatccgcatcactatgcccttgcaggcccatcgtatgctctattttcactccgcccagccacaaatcacgctccggaaccaatgcatgcacatcatatccaaacccaacccgtactttcatcactttcaacttttaacttccaactttcatctgaacaagttcttgatcccgtccatatcaaaagacagggagaaacgaagtgtttggtccaacgggttctgcggaaccgtactaaccagataagcagcatccagctggaacacactcatacggaaaccggcacccacagaaaagtatttacggttaccgacattcgcattctcgtaaaagtaaccaccacggacgaagaactgctggttataactatactcggctccgaccgaaaccatgatctccttcagcaggccgttaggtgaatcggtaaaagacttcaacataccggaaaggctcgaccatgatttatagtcgtccacacgcgtctggtaatcggcatcagtctctccttcttccttttgcggagcatacgggaccatgtatttgttcaggtccagataaacgccgatctggttgtaatcgtcaatcggataaagcaaaccggtccccaacgtcagctttgccggaaggtactggttcgtattacccccgtcatacgagatcttactccctatattcgacaggttgaaaccaaagctccacaatgcctcggcattacccatcagcacatatttttccagataaccggaaatatcggcagaaaaagcattgcccgcattgctttcgtcattctggtccgtccccatatccgaacggatgtaacgcaaggttaccgccattgaataggactcggacagcttgcgactataagccacgtcgaacgccatctcatacggattcaaaccataagggacatccccgatgttctcccatatattcacttcacctaacgagaaataacgcaaagatgcactgatagcctgtaaatcgctatttcctaatttgtagtaaccggtcatattcaccaaggccacatcattgaccaatttacgcaaccacggcgtatatgacaaactgactcccgccttacttcccataaaagcatatttggcagcattccaatactgcgagttgatgtccggcaaagtcgccgcgcccatgtctcccataccgccgcctcgtgcatccggagcgatgttcaacgaaggaaccgccatttggagcaaagaaggattatcctgtccccaaatcatcgcaaccgaagcgaagaagttaagtattataacgagtgcaccgattctgaatttacttatcatatgtctatccttaaatttattttccgattcaatagggacgattcacgaaccgctcctactgcattataaactgaataatccgaactttattgtatgctcaaataaaattcctacttttgtcttttgagtatgaaagatatacaatcgacaggcaaagttaaagcattatttcttctgatgcgccctttccagtgggtaaaaaacatcatcttgttccttcccatgttttttgcacaggagataggagatacggacaggctgtggaatgttgcaatcctgtttgccggtttctgcttgctcaccagtggcgtatatattttcaacgacttgatggatgcgggtgaagaccgcttgcatccggtcaaacgattccgtccgatcgcctcccggaaagtttctccgatggccgcccttgtcttcatgttcctgctatatgcgacgagtgcattatgtttcagcttcatgtatacaagcaataaccagatctggttattgtcaggaggatatatcctcctgaacttggcctatacgctttacctcaaacaggtacagatcatagatgccatgattgtcgcctgcggtttcatcatccggcttgaagcgggagctgttgccggggagatagagctgtcgcactggctgatcatcatgacattcatcctctccctgttcctcgcctttgccaaacgccgggacgatttgcgtaatttcatggagaccggacagatttcacgtaagaatattaccggatatacgatcgactacctgaacgtgatcctgtcgtttctctcttccatcatagccgtgacttacatattatatacgctttcgcccgaagtgacgtcgaggagcagcgaatacctgtatgccacagtccctttcgtattggcaggcatcatgcgctatctgcaaatcatcctggtggagaagagcaattgcaacccgaccgacatcctcttacaggaccgtactttgcagttgaccgtggccggctggtttatcgtattcgctttacttatttattgatatggcaatcgcaatattcgacttcgacggaaccatcatttcccgcgactctttgccggattttctgattcaggcttgtggacggaaggctttcctcctgcggctcccctggattatcctgctgaaaggagcagccttaacgggcattctctccacgcaccgggccaaagagcttgtgatcacctctttcctgcgaggaatgaagacggaggatttccaacaggcttgtctcgaatatgcctcccgtataccggctttcgtctatcctgcggccttggaagaaatacgcaggcatcaggaagaaggaaacaagatcgccattatcagcgcgtccgtgcccgactggatacgcccctgggcacaaactgtcggaatccggctcgtggaaggaacagagctggaagttagggagcagactttgaccgggcgtttttccacgcccaactgtaaaggaggtgagaaggtacgcaggctccgccggctatatccggatttcgcctccgagacgctgcatgtatatggcgacagttccggcgacaaagaactgctcgcccttgcagatgtcccccattataaaccattcaacaataaataaacatatagtatgatgccatcctgcctgtctatcctgtttcgcgctctccggatcgagtggagagagactaagcgcacgttatttccgacgaccccgatagaaaccgggcttttccttttcttcttccttctttacgggtgtatcggttaccggatgctctttcatacggaactgatcgatgtacccaacgggggagcgggaagttacttaggctatgacaatctattccatctccacacgcgcggaggagcattcgacatcagccatccctttttcggcatcttccatttgttgaaaacactgttgacaatcctgttgacaaccctgttcaaagagaaaacttccggtattatttgcctgacgctgatgaacctattgataaccggcggactggtcctgatctatcgttacctgaagcagatcgtccggatttcttctcggcgggcactgttactgacagggttcacgggatgctttttcacgaccgttgtcttatcattcaccacagaatcttatccgttctcctttttcctgctcgtcttctcactactaatgctttccagggaatacatgctgaccggatatataaaaggccggacgatcctctttctctctttcctttgtggaggaataacaatcaccaacgcagccaaaccgacaatggccctgtttctgaataaagcaccgttctggcgtaaaatacggacaggattcaaagtcatgctgccatttgtcatttgcgtagctgccgtcatgggcttttacaccctcaaagcgaaactgttcaacccggaaggcccgtctcctatcgaaacgaccgggcaactcggacagtattttatccacgacgagacattcggcaaacaagcactggtcgatttctggggcaatacgattataagcacgcctctcacacaacagctagtcggggaagaggtcgtattgcgtcccagcgaatacctgcacagttggaacaatgccgtaatcatgtttctgttgtttttagtcgtggcctcggctttgctcaacctgaaaaacaaatatgtacaactgctacttatgtacctgagtatcgatttcgtgatccactttatcatccgctatgggatgaacgaggcgatcctgttcggtgggcattggatgtttgcaatcccgatcctgctgggctggctatacacacgattgccggtccgcatgtaccggatactggactgggttattatcggattctttgtcctgactgcaacgataaacacgatggagtttatgcgttccttcttattcgcctaaaatgatgaatttccttgcttttgtcgcgtctttggaattatcggtactgatagctgcccggtagatataaacaccgggacgcatacgggcaccaccggatgtcagatcccaggaaaccgtatagttttcgaacagaccagacgttccactttcttcatgtttccaaagttgtcggcctgccagatcgtagaccataatgcccactcgcatccgactttcgggacggttgtgcataagatggaaagtcacttgctcacgggcgatacccggtgttgcgatcacatcgaacaggaagggtttcagtccctcgaccacttcaaaagtaaatgtccgcacagtcgagttattcaagatatcccacacccagaactccgccgtatgtttacccggctcaagcgccgggatcgggaacttcacgataccggtcccatcttcgccaagtaacagttcgtaataactgttcaggttatagctcaggacggtcgattcgtctattaccagcatcatatcatgcccgacactgcttcccgtgatattcactccgctcttatcccataactcagcgacaaaatagggagtcgtgttcacctggccgccatctacaaatgtcgtatcattcaggtaaagggcacggatttccggaccgatcgtatcggtttccgccgtgtcggaagttcctccgacaatgaaattgtcgaaattaccctgtgcctcattgccactttccgtatcgacggcatagagattcattttcccctgcaaattagaataggaaatatccttcggaaccgtaaaagtaaagctgaactttccgttgcgcacggagtcattccctataaaaatcgtattcggatagtcggtgaaggtgaaagccggactgtcatctttattgctgttcttcaagcaggtgacagtcaccttgctgtcttttaccgtcgggttgactataccagtaaaatcagttaccaactgcccggaagcatccaacacctctccttcgacagtgatcttttccaaagctttgaaagatattgaatttccgtctaccgattgcccgtttacagtcgtcactttcattccaaattctggataagccatttttacagctgggtctccgatcaagcagaaaccaagtttgtaaacggacgacaaggtgtttttcgttgcttgcatcacttctcccagcgtacgacgacgcccattatttctttcaaacaaattacggataacattgtcgttgatcgggaaattaggtctggaataagcgacacggacagtcgtaaacagcgcaatgcccccactgcttttattcagaaagacatcttctccggcagacgtattcaagtcatcgaatcgcgtaaaatcgcaggtagccgtcacccataccggcagatgagtataagtaaactggttgatatctgtttgtgttaacactttctcatcgcttaaagccgttgtccctccatgtccggtataattaaacaatagaagtccgtcttttagaagtttttgcaagccactccttacatccggataagttcctgccgtcatgtcttttttataggcatcataatacagtttattcaccaaaaactcaggatgttcactttcgacataacctgccaactgatcagcaaactccatatgctcagtcataaatccatccgtattgctaccatcatcagccataaaacacagattgtttttccacgaacctgtatttctattttccatataagagattaccttatccaccatctgagtcgcctgctccacagtcctgataggaaagcgtccgatccccagacatagttttttattttgaagggatttcttattatccgcatcatccagaaatccgaaatagtcatcaatcacatacgattgactacttaatgaattttccgtctgatacgtcaataacatattgctcatatccaccgatttccaggcggaagtcaatttacggttgtcgaacgagccatcgccgaacagcagtaaatatttaggagcatcagcttccgaagtctgccggtcgtagaacatcttcataaaacggcgataagcagttgcatccggtgtaccgctggaaaactcgttataaattgattctggcgtcaccacccggaccgtcaggttatcctttgtccgatgcgcttccgccaaacgttctgcctgcgtggtaaaattaggctgggcaataatgatcatatcttgctgtggcaaagcatgcagattctgattcgccacctcgccgaccgtcacgggagctttgatctgtgaaggttttactacgacaaactccctcaaggaagcggaagcaggaattgaaaaagacaactctgtcccgttcagagacgtttccatctgttgcggatttacaccgtcggtcacatcaaaaaccagcgtactggcatcggctccctgaatcacaaaacgggaagcattgcctcttgccgagaggctgcggaagaatgtataattgtcatatactttcaattgcctcttcatctgcagacggaaatagttcaagtgcacattcttatgtccggtcgtactgtatccgatgttgacctttacagtctcacctttatcagccgtccaagctctttcgcgatacagttcccgtgccacttcgtattcgtccgacgggacagacacggaaccggatattaaagcgtttccatcgacattcatagtaatcgttccgttgccacgggagataaaagacagagtggcttttccctcgtcgttcgtaatacccggaaccgatatcgtgaaatcacgggataaagtagaagtaaacgattccccatacagttcgcgcccggaactgttcaccgataccaactcttcttcgtgcaaaacatagtcatcgaaagttgtcacttgcaaagtggctccagcagcagatgcagccttctccatcgtacgcccggctgtttctttctcggtcacgaaataatatccgtaattggaataggggttgttggtgtggataaaggacttatcagaagaagaatattcccatttgcgcggccctttcccataaaacaacaaataatccgcactcctccatacggctacctcagggacatcatcaatataggtagtagagaaatcttcatccaaaggccatcctccgtagccataaacagctactttatccaaattggaaaagcccatctttttcagatcggcagccgtcagtttgtaaataccatcttccgccacctgtatcttcacccatttcccggagttcaataccgactcggaggcatatcggctactatccgcccaagcagaagtgagcagaccgaatacaaacagcaagacacataagattctcttcatacgttttttccgtgttatctcacaaagaaatccagcagcttctgctcgccgatatatccctgcaagtggtcgtctatcttgaccggccccacgcctaccggggttccggtgtagatcaaatcacctatcttcaacgtaaagaaacggctcacataggcaatgatcttgtcgaccgggaaaagcatatcctgtgtatttccctcctggacggtcttgccgttaatatccagatggaaaggaatgcggttcacatctcccacacgctccagtgggacgaatgtcccaagaacagccgaattatcgaacgccttgctgatttcccaaggcagaccttgcgcacgcagcttgttttgcaaatcgcgggctgtaaagtcaattcctaccgtcacctcgttatagtaacgatgggcgaaacgttcggcaatgttttttcccagccggtctatcttcacgacgatctccgtttcgtaatgaatctccgaagagaaatcaggaatgaagaacggtttgccgtctttcagtaacgaagagtcggacttcataaagatagtaggctccgataattttaacgaatgatgcagctctttattgtgagcagcataattcattcctacggctattattttcatatatcagtgattgattgaattcaagcggttgaacatcacagcaagatgggcatacatagaggtattttgcaccacgatatcttccggcacacggatacggaacggggtaaagttccacaaagccttgattcctcccgcgataatcaattcggtcacttcctgcgccttgtcgacagggacggtaatcactccgatcgtcgctccgtattccttctgcttggcaggaaaatcatccatgtggtagaccggtatcccgttaatctcggttccggccaattcccgacggacatcgaagcctccaacaatctccaatccgtattgtttcagaccggaatcctgcaacaaggcggctcccaagctaccgacaccgaacaagaatgctttatgctgcgccgtaaaacctaagaaatcctccaacacatccaccagcgtgctgatttcatagccgacacgtgtcttccctgaaatattcacaaaagagaggtctttcgccacctgactggggtccacattaatttctttggcaatctgagtagatgatacgaaagcttcccctcttcctttcatcagtttcaaaaaggcaagataccacggcaacctcctaagagtcggctccggcactttccagatttgtttcatttcatcgttagccattgttcaatctttattaatgtagctcacaaaagtacaatttttttctttgggaatagaaaaatagaacacgctcttttcataaagcgtccatctgttttcgccaccgatacggacgataactatataaatgttcttgcaaaaccaaccatcatactatcataatcgcccgtatattactttaaaacaactcgttacagcatgatagttaccattttacactattattcatctatcataaccatcatagtgaaaaacgataacatactgtatgtcaattatacaataaaaacagagaccgtccgggaataggtgcagaacaggttaaaatagcttcatttttcatcaagacaagcttttcttttgccaaaaacggcttgaatagctgcttgagacccgggtgtaagagccacggacatccgggtgtggaagaggtgcagatccgggtctgtgcgaagctcttccggggatgtggggatgtttatctgccatgttgaggacacttttatgccctgtttttgcatcttatccggcgaaaagagcgttttttgtgccaaataatctcgtttctgtcgatagtcattttggcctatataaatataagcagctcattatcggttacataaataaactattaaataaaaagcatgatagatgcatggtaagcgtctccgcgatgctaccattgttcttcaaacaagagtatttagctttgtcatcaaaaaaagatgaaagcagaaactcgttttccccgtacagtagaagcctacaaggcacatttgcatgaagatcgccctcattacgacagttttcaaaccttttgccgtaaacaaggggtacgttataaaggagtgatgcaatggatgcatcgtcataatcgaagcgtaggaagtttacgtttggaagtattattggaaaaaaacggtaatgacagtaacttgaaaagttcacttatagaagtgtcagggcaaagctttccgatcaagaactcctgcatatcctcacgcaatattcctttggaccaatatatcaaaggtgcgatcctctctttccctgacggtgtatccattagtatccgcgagaccaccccttcggccttaatgaagctttttgaattatacacccaagtaacaggcaatccaaatgtttagtctgaacgaatccctgcattattatctttacccttactatatcaatatggggtgtggaatagagattttatccgaactggttcgcaatacaaagacaggaaacccactcagcggagatgtctatttgttctgtggtaaaaaacgggacatgatcaaactgttgcgctggcaggaagacggatttattttatatcagaagcgtttagaggacgggacctttgaactcccccgttttaatccccgtgaggactggaataagatcgaatggaaaacgttcatgatgatcatgtcaggcatctctctgaattcagtgaagtacaggaaacgccttcgtttgtagtccggtctattgatttgtagggcgccgctttataaataaaagcataaatattttgccgccggaagaactatccgtatctttaaggcatggattacaagcggattgccctcttattggaagaccagttgaaattggctgcgcagcgggaagaggagttgttgaaagtgatcgcagatcagaatgaacagctcaatatcctgactgcggaagtcaaatccttaaacagttccatcctctcgttggagaaagccctgttggaaaagaatgcatcccttgaaggccagcaaagtaaagtccgcatattgggaaagatggtatcgggcaagaaatccgaacaggtctctgtccccgataaaggaacgacaatcatagccaaagtaaaacccagtctgaaagaaagagggaacaacggagccagacgcaaagaatattttaatctggaaacctgccatcatgatatctatccggatgcagcagagttcaaagtggaagaaggcaaaaaaatacgtacgacagattgcatccgctacgaatttattcctccccgttttatcaagcatatctatcaccagcactattatgcctgtaaaggcactgtttatgccggaagtctgccagctgtccccttgttgaactctaattatgatgcatccttcatcgccggtatcctgcagttgcgctatatctactccatgccagtcgaacgtatcatcaaactcttcgcagagcatggctttgagatgaataaagccacggctcatggactgattaaaaaagcggccggtctgtttgacctggttgaagatgttctcaaagagactgtcctctcggacaattatctgagtatggacgagagctattataccgttcttaccagtgatacaaacaactcatccggcaaatccacagccaaaggatatatttgggcagcactggctaatcatctaaaactggtacatttcttttacgaaaacggttcacgttccagaaaggtcctgaccggttatctcagggaagactaccggggagctatacaaagtgacggattaggaaattacaagataatagaaaaagaggcctatccggatgccatccgcctatcctgtttccaacattgcaaacgcaagttcctgaatataacaggaaacaaggatgctgaaaaaatcgtacgaatcatcaatcgcctttaccaaaatgagcaccgcattcccccggactggacagcccgccagatactggactatagaaataaatatgctccccctatcctcaaagaattaaaagaggaactgataaatataaaaaacaaaaagtcgactttacccaaaagtgaattaagtaaggcgattaactatacgttaaacgaatatgatgctttatgcaattatatccgcagtgcagactatgctccggacaataatgcgattgaaagactaatgcgatatattagcttaagccgcagaaactccttattctgtgggagtcatcagggggctaaaagggctgcactgatctactcactggcttgttcgtgcaggctcaacaacattaactcatttgagtattttaaagatttgcttactaagctcattgatataaatcccaatacagaccacgagactataagaaatttactcccccataaatggcaaaggtagcatcgcggagacgattacgatgcatgatggtagaatgatagtagaaaacaactactatcatgctttaacatattgtgaaacaacagctaacaaccagccatgatagtatgatagttggtttgcaaatttttatagagaaaaaagagatggccttggatagcaatttttggtgcggttgccctgaaaacatacagaatcaatgcttttttttaacaaaagcctccccgatattgctaccggagaggcttcattttgtgtctgccttttctcttcacagggataatggcagatgaactttttttaattttttactttagtattaatattaccgcctgttcacccatcacgggataattagcttgaaagctgcacggtaaaatttagaattatttgatttataaaatcttattctttttcagagcagagatacgattgctcgtatccctacctgatgatgaattttctattattacttaacgatagccttaacagcttcttcgccttcaacagctactacaactacaccctgaggagcagcaattacagcattgtcagaagtgataactgtgttagctactgtctggccaaggatgttagaaacaacaaccttcttaccggcagcattagcaacacgtatagcaccctgctgagcgattacagttacttctgatgttgcaatttcttcgttgtctgttgccaattgatcatcttctttgttttcaacgttgaagatcagggcaccgtcaccaccagtcttagcgttagagaaataagaaggattcttagtcaagacaacgcaaccattctggatcttcaaccaagagccgttttcaggagcaatcttttcaccatcatagttgtttgattcgaacaagaatttgttagcattaccttcttcttccacattaccggcagcttcaggattcacataacggaatgaccaagtataatttttgtggttgacgccagtcaacacattcttaatcttggttgcaccagcagccaccaaagaatcatttacagcttgtaatcttgcaaaatcgatcttatcatttgccaaagccttgaattcgtctgtcaaaacccacaatgtatcagcctgtttgatagcttcaacaaaacctacgcgaacataaccagcagttacatctgtgtacggtttcttgtaaccattagcagcagcagaatcagcgaagctaactacatatttacctctttcaaatgcagccttacccggaatagcatggatacagtggttagcatctaccaagttaccattttcatcacggtgagttccgtctgcttccgtacaaggaattgtatctgtacccgcgaaatcattatgagcaacagaaagtagatactgaggtttgatatcaccattgtcacggttgatcacagctgtatcgatctggaaggcaagacctgtagccttgttagcagtccacatacctacataattcacgttagcatccatcaaaccaccttcgcggttgttttcatccatcagatattctttacgaacattttcaaagaatctcaaactgtcacgaccatctgttgcactttcacccaaagccgtattgttgaaacggcgatacagaggagcatcgctcttagcgatagcaaatacagaagttcttgtttcagtcaatacctgagcacgcagcagagcatcttcatcgttgtcgacaacaccagctttattcaagccattgttattaatcaaagcataataacaagtcagatcttcacccttcgtaaattcattgttttctttgaaatagaaagaagttacagcatctgtgctagccggatttgtcgttgccatgatctggtgttctttgtttacatagagcttacgtccgtaaggtgcagaaaccgtataaagacgtctttccaactgagccaatgtcggaatataagtattagcaccacgagcatctacatcataaccgaattcagcagcttgagcagcttcaattgagaaacggccagcatcttcagtcaatacgttcaaaacagagtcttcagcattcttgttcaggtatttatcagctgtataagcatgccagtagttgaatgtataacgatttacatccagatcctgatcttccaaaaatttgtatccattgtgtttgtcagcaacagcgtcagcagaaaccggttcaaagacaacttctacaccattcaacttgtactggccgtctttagtaccttttctcaactggatctgataatcgttctgtgcatcgaactcacggttagttacctgaaccggagaaatttctgcacgaagagcagaatgatctttcttgataacaacccactggaatgcagggatatggttaaaattcatattcttgataacatcacctccagtatattcagctacagagtctgcatcataaatgtgaacgccataatattcaccagttttcacatttttgatcgtgtaaacaccgtcagcgatacttgcataatcagaatcgataccgtcggcgtaagccaaaagatttacgtggttttcaacaggtcttccagcaagcacatcgtcatcatagaaagtaacgacattcttagcttcgtctaccaaagtacaatgtgacaacactgtaaacagcttcgtattattctgaacacctggtttaaaaccagttgccatgctaccagaaattccaccatctacacgggcatcatcattcaacattgtccaatatgtcacttcgcttcctttctggcttttcggagccacggcatttgccaactcaacaaactgagagaaagattcgacttgcaaagagtctgtcaacaggtcctttgtgaatttgaaacggaatgcatcgtccggcaaattatagcctaatgtatcaatcacattataaccattaaccggtgtaaccaaattgcctgcggcatctttttccatgattgcagccgatgttgtcaactgattatacagtttgaaagaagcaccagtactttcataataagacgtatcaagacgtaaatagttataagacaattctccttcgtcattcaatttgttcaaaaacagatattcatcttgtgctggtgtatatccaccttttttgttacgcagaacttcataaggagaagaaggagtaccactacttctcaggacctgggcttgatacttatcggcaaacggatttttgtcgatatcctctgcaaaagacaactgcatgtacttaacatcatcgccctttgtgttcaggtcttcagcagacattacccaagaacccggagtcaagatctgtaaagctgtacctgattgcagtttttgtttcgaatcttttgctgcataaataacgttagtagcagcatctacacgaatcaccaaagtagagtcaccaccggcaaagtccatagaaacaacttcggaggcttgtaaagagttagaaacattgtaacggctgttataccaaatccactgtgtcaaagcaccaccaacttcagctgcattacctgaaacagcagaagtagatgtacccgtttcttttactgcattcttcggatcaaaagaaaaagtagcacctgttgccttgtttgtcataacaaaacgagtagcaccaccatcacctgtcacattagcagaaaccgtccacaaagcggaatcaacttttgccaaagaattcaatgagtttgctgcaaccgatttaaaagcgagagttccatcggcagtttctgtaacgcttacaacattagttgccccacttcctacgcctaaagcataatacttggcctgacgaatttcaggttcactagaaaaaacctgaggattaaacgtctgcgcagaagctccgacaccagaagccagcagaacaccggctacaagagtagaaaactttttgttcataatctaataatttaattaataatactatatataatgaaattcagttctataaatccctctttgggatcatcctataaaatgactaatgaaaacgtacgttttttttagtcattttgggggagggtttaaatggtttgtgataaaaaggtggtttttcgtacatgttaagctatctaattgataagaaagaatatagaaaaagaaaaatctttgaggaaagaattgcaggttcaaaaagtatatgtatttttgtagctgaaaaatgacgaatttaaacgtacgtttttttagtcattttattttatggacctatcttgttgatataaaattaattacatcccaatttttgcctatttttaccctcataaacatacgtacgcgtgtacctttcaagatcacaagtacacctaataatcaatatattacgaaattgccaaacttgcaaaaaagagttttcccgcaaaaaaacaaaaaaacatcacctacgagacaatatacatatcctcaatatacatacaattcctacttttcataccgagaaaggagatcattcagcatgcacaacgcaagaaaacttcacagttgacattgtggcaacaaaaaagcctccgatgaaaaagatccaccggaagcttcctattatattattatataatgtatatacgaatcagattctcgcaagcgtcgtaacaataaagtcccacgtacgggcaacagacggaatgctgacacgctcgtcaggagaatgcggatgctgcaagtccggaccgatagagatcatgtccatatcaggataggattcctgaatgataccgcattccagaccggcatgcataaccttagcctccggcttctttccgtacaaatccaaataagcttgctgcatgattttcaggatcggcgaatcgatattcggctgccatccgccgtaaccatccgaatattccaccttcgccccggctagagagaaaatactttccaaactcgaacaaacagcttccttgcggctctcggacgaactgcgaaccaaaatctgaatctcgatcatttcgttcgaggacttgacgattgccaagtttgtagacgattcgaccgtacccggaaaatcgaccagcatactgatcacaccgttctggcagccttctatcgcattgatcagatcatcctgaatctcttccggaatcagagttgccggcatatcggtcatttcggccgtaaaattaatattgtgttcaatgcccttatattcgtagcggtacatttcctgataatcggacacaagctcccaaagagcttccacattatctccaggaattgttattacggcaaaagcttcacgcgggatagcgttgcgcaacgaaccgccgtcgacagatgacagacgagccccataatcgcgtacggcctctttcaagaaacggaacatcagcttattcgcattcgcacgtcccaaatgaatatccacaccagagtgaccgcctttcaagccggtcaggctgattttcacggcaacatcgccctccggaatataagtatcttccttaaattgcatggagacattcagatcggcaccaccggcacaaccgacaaacaactcgccttcttcctccgaatcacagttcaacaggatttcccctttcaggaaacccggcttcaaaccgactgcgccatccattcccacttcttcgttaatggtaaaaagggcttccagaggaccgtgcgtcaatgtcttgtccgccaggacagccatagcaaaagcagcacccataccgttatcagcacccaatgtcgtttcgcgtgctttcacccaatctccatctatataagcatcgatcggatcggttagaaaatcatgttttaccgaagagttcttctgcggaaccatatcgaggtgagactgcatggtcacggttttgtgtccttccattcccggagaagccggtttacgaatcaaaacgtttcccacttcgtcctgcaaagtttccaatcccaatcctttaccaaaagctaccataaaacgggttacagcctccatatgtccggtcggacgagggatttgcgtaaggtcatagaaataaccccaaactggctgcggagaaagatttttgatttctgcggacataaataaaactgcgttttaattgacaattgacaacttaatcaatggacaattgacaattaggttaataattaatgttatatatcgaatggacaaccgggcatttaattgtcaattgtcaattgtccattgtcaattcctttgtttacaaaaggtagcgccaccacaccaaacagtcccgtaattccgagccaggcagtttgcaccgtatgcaccaccagagcaaaagccgcagcatcggtttcttttactccgaagcacatcaaagtggcgatcaccataaaatgccacggaccaattcccccctgcacgggtaccgccacagcgatactactcatcgtaaaagcgatcagaccgaccgttacacccaaatcacgggtaaaatcgaaagcatagaaagtgatgtagaaatacaggaaatatcctgtccagatcaacagggtttgaataacgaaaagacctttacgcttcatcagccagatgctcttcattccatcccagacgttctgcaacatcgactttgctttcttgaccagcgtaaagttactcatatatgtgaatataaaccaaattccggcaataaaaattacgccggccacataaatccatatcgagttgaacatggactgaaaaccatccagcaacgcagggttcttcgcaaagaaactatggaaaaaatcaaaattgaagataatgatggacattgtgatcagcccgaccatgatggtatcgctcacacggtcgatcagcagcgtccccaacaggcgggtaaacgggatcttgtcatatttggttatcatcccgcaacgccagacttcaccgacacgcggtagcacaaggttcacagcataatttcccaacacagcataaatcacattgcaggtcttcaccttatcacctaacgaacgaatcagcagtccccaacgcaatccccggataatattggctcccaagccaaacaaaagggaaaaaagaataatctcatagcggacccccttacgaatcacattccagatctcgccaatatccatcttactgtacagataccaaaggagtaaacaaccgaatgcaagcgggagaattatcttgagaaacgtgcgtagaattgctttaaaatccattatacgtagatgactttaaattatttgttgtatttttgtacgcctgcaaagataagcattatatttaaatacgaacacattacaccaaagaagtggatgagattagttaagcccaaaaaagcattaggacaacatttcctgaaagatctgcaaatagctgagcgtattgcagatacattgtccgatcacaagcagttacctgtactggaaattggccctgggatgggcgtcctcacccaattcttactggaaaaaggacacgatctgacagtagtggagctggacatggaatcggtcgattacctggaacagaactttcccgccttggaaggcaagattttggccgaagactttctgcgtctggatctcggcaagttgtttccggaccagttttgtgtgattggcaattatccttataatatatccagtcagatatttttcaaagtgctcgactacaaggaacatattccctgctgttcgggtatgatacagaaagaggtggccgaacgtcttgctgccggtccgggtagtaagacatacggcatcctgagcgtcctgctacaggcctggtacgaagtggaatatctgtttacggtcagcgagaatgtattcgatccgcctccaaaggtcaagagtgcggtgatacggatggtgcgcaatgaccgaaaatcgttgggatgtgacgagaagcttttcaagacggttgtcaaaacctcgttcaaccaacgtcgcaaaacattgcgcaactccatgaaacctctgctgggtaaggattgtcccgattattcgctcccgatctttaacaaacgaccggaacagctttccgtagagcagttcgtggaactgacgctgataacggagcgaaacttaaaagatttatgatttcagatttatgatttatgacttatggagcttgcattgtttcacaaatcataaatcataaatcataaattctccaaagcatgattgaactgacgaaagaatatatagaccatctaaaagacatcatcacggagaaggatgatgctaagattaaggagatactggacgaactgtatccggcggacatagccgaactgtaccaggtgcttgatttgcaagaggctatctacctctatctgctgatggatggtgaaaaggcagcggatgttctgatggaactggatgaagaagaccgtcacaagttgctgaaagaacttccgaacgaactgattgccaaacgcttcgtggacaatatggaaaccgacgacgctgtagacctgatgcgtgagttggacgaagatacccaggaagagattctttcgcacatcgaagacgtagagcaggcgggcgacatcgtcgacctcttgaaatacgatgaagacactgccggtggattgatgggtaccgaaatgatcgtggtgaacgagaattggagtatgcccaaatgtatcgacgagatgcgcaaacaagctgaagacatggatgagatctattacgtctatgtagttgacgatgatgagcgccttcgcggagtcctccccctgcagaagctgatcactaatccttccgtctcgaagatcaagcatgtgatgaagaaagacccgatctccgtccgcgacagtgacagtatcgaagaggtgaccgaaacgatcgaaaaatatgacctggtcgccctacctgttatcgacagcatcgggcgtctcgtcggacgtatcaccatcgacgatgtcatggatgaagtccgcgaacagcacgaacgtgactaccagttggcatccggtatctcgcaggatgtggaaacttcggataatgtcttcacccaaacggccgcccgccttccctggctcctgatcggtatgataggcggtatcgggaactccctgatcttaggtaatttcgaagggaattttgccgtcaaccccaagatggcgctgtttattccgttgattggaggaacaggtggaaatgtcggtatccagtcttccgccatcgtggtacaaggcctggccaacaacagcttgaaggaaggtaacattctgcctcagatcttgaaagagtctgtcgtttcactgattaacgccagcatcatcagtttagtcgtatttatctataatttctttatgttaggcgacagaggcatcaccgcttcggtttccttaagcttgtttgcggtcgtgatgttcgccagtgtcttcggaacactggtccccatgactctcgataaactgaagatcgaccctgctttggccaccggaccgtttatcaccatcacaaacgatattataggtatgatgatctacatgttcattacgtctgcactggctggataagcaaaaaacaatctgtcacacaaaagtatgtttcaaaataaaatccgctttactaataaacattatttgaccatggaatttacagcttaacacgggatgaatatactttcattccgtgttaagctgtaaattccatacccaaaagatcgtcataaatgttatgacactctacatttcaaattccaatcaccagcctgtaggttgttttatattggaattagccgtttcctcttgttgtggtaatggccaagagtcatatttcggaaacacacaagcacgggtttctatcaatacgaaagcctcatcattcggattccaagctccataaatcggaccactcattgtttccgtcccaattccccaacgacgaatatcatcataacgtttgttttcaaaacaaagttccacacgacgttcacgacgatacagttcgcgcaccttctcctgtgtgttataaacagacttgtccatagccggtaatcctgcacgatgacggatcatattgatataagtctcaacatccggattttgccaatcccccgtttcaaccaaacattctacataatctaacagcacttcggcatagcgatacagaggaaaatctaacgatccatagcctgtagaacggtcattttcatcaataaacttcttcaacatatacccagaacgcgaagcaccagtcttgccaacatagtcactacttccaggatcaaacggcgtataggtataattagagatagaagagttatctcctggaagtatataagtagcagccaaacgaggatcacgtggtttatacaacggattcttttcgtattgttgacgttcggatgcaggcaaagattggatcgtcttaccatctattgtttcatatgtatccaacagtgattttaaaggagcagcacaaccttgtcctcccaatggcgtccccatattacggaaccatatatcgtttgcaccatctttggtaaagaagatacgttctttattctgctctcctttataggtaaacaagttgcgataattagctgacagatccgaaggttcagattccgtatcatagtacagttcaaatgctctcgaatctattaagcgctttgctgccgcttttgccaaatcatatttcttgaactgcaagttaatgtccatcttcatagccaagaccactgcctggcagatacggtcacggcgtccttcgtcccacaagaaaggaaaagccttttcatcttgaacatttaggatctcatcaaactcccgatttaagaaatcaaggcactcttccaccgtattacgcccgatatacacttccgtaggatctaaagaattatcaacaataggtataccatcattccggccataccaccgcaacaaattcaaatggtaccaagcccgccatgtccgcgcttccactttcatacgtgttcgttcagattcatccgaaaaataggctgcatccacgtgttccaagaaacggcagcagcgacggattttctgataataataacgccaagtccaaaaagtcgattcccaagaagaaggtgaattattagatgtaggaggaaccaaagaaccatttcccatcatgacaatacgctgttcaaaattggacaaaaaatacatattatctgtcataccttccatacatacaaaacttaaatcatccccaccatgtccggctttcggccatgaacggcattgccctaatgcgttttcacactcattcatcgtcttccaaaattcatcgtctgttgttgccgttggatggtcttttgtcaaaaaatcttcacatccagtagttccaatcaacaatatagacgaaagtacagctattttaaaaaaattatattgtttcataatcaaacctttttattattagaaattcaaactaagtcccaaagaataagttttcactaatggataagatcctcgttgcccacggctttctggatcaaccaatttttccttggcaaacgtaaacggattttgaacattggcatagatccggatattagagattcctatttttttcagtcccatttgatcgaacaaatagcccaactgaatgtatttaacacgacaatagctggcatcaaaatgccaaaaatcagatgtatgatggttactaccataagaagagttaggagccattctcggataacgtgcagtcgtgtttgtcggagtccaatagtctttctggactgctaaaggagtttgcccgtctcctcctacgttcaaaccaaaagaatagggttcggaataataagcatccactccttgcacaccctgaaataacacttccagattccagtttttataatccaacgtaatattggcaaaataattcaaattgggctgatcatctccccggataacacgatcatctgtcgtaatacgaccatccccgttttgatccaaataatggatatctcccggtttttgcccgtcaaaaataacaacgccatctttcggtttcaaatttccagaagcatccttcacaaaatcattttcttgcaacaaaccatctgtcggatagacataatgactattcaatgcatatcctacttgatgaatgcgattaccatgatcataaggagcaccaaacagttcttctattttgtttttattttgtgaaagaccaccatgtatactaaacccaaaatcctttgtcaactgttttccatacgtaaaatccaattcccaccctctgttacgaacttcacctgaatttaacggtgctgaagaagtacctccgatatatgaagtcggcggtgtaataatcatatcggttgtcaatttatcataataatcaaaagtaatagatagatctttgaagagacgaatatccgcaccaatgttcagcatatggacagtttcccatgtaatatccggatttccaaatacagtctcattaccattgcccgcatcgatcaacgactgatacttatataacccaatattttcgttgcccaacaaaccataggaagctctcactttaaactcggaaatctgatccttcaatggcttcataaaagcctcttcatgtaagttccacccagctccgacagaggggaaaacccaaaatttgttgccttttccaaaacgagaagagccatcccgacgcacagtcgcctccaacaaatatcgagaatcaaacgtataattggcctttgcaaacaaagaaaccatggaccaacgatcccaatcgccactattggttaattcttgattataaccggcaatagtgaacaggcgatgctttcgcttttcaaatgtatattcggctgttccacccaaatagtaataacttgaacgatctttggaagctccataactcgctccccatgtttgtaaaaatgcaccagaattgtaatcaaaaaagttataggcttctcgctcatcccgttgtgcactgctactgattcgatatgaatattgtccccgaactatcaatttagggataatctcccaacgaggcgcaatattgatactaatattatcttccaaattagttcgaattccaccacgttcaataatcgctgcaggattacgctgctcaggtctattcccataataaacaatatcactgccttctttcattggataatggataactgtcgtaggtggtgtacgatagatataggtaaaaatatccccaccattatcaaataatggtttttctctatttgtccgataagaattgaagtccatattcacagacaaattatccaacaagttaacagatgtattagcacgaatattcaatcgatctgaattagtattttcaactaatccattatttttcaaataattcacagtcaaagcgaaacgagctaaattactacctcctgaaacagcaaccgaatgactttgcagcgaacccgttttgaataaccaatctgcccaatcagtatccggataattgatcggatcagtatggttacgagttgcttctattgcctctttagaataaactgcatttccacctatattcaagtttgcagcattaaccatctccatatatccggctccatctataaattcaggtaaatacgttgcttcctgcaagccaaaatagccattgtaagaaacatttacctttcctggcatacctcgcttcgtttttacgacaatcacaccattggcagcacgagcaccataaattgctgctgcagccgcatctttcaaaaccgtcacactttcaatcgtattcgggtccaattgattcatatccatcggaatgccatcaactaagactaaaggatcattattggtctccaatgaagaaataccgcgaatcttaattgttgcagcatcagcacccggtagaccagaattttgtgtcacattcaatcccgtaattcctccttgcagagattgagaaagggatgtaattggtttagtcgacagatttttactgatatctaaagaagatacagacgaaatcgagttcaatttcttttcttccgagatccccgtcaccacaatttcatccagcttttccgattcggcattcaaagaaactgttaagttactaattgcacgtgagacaacatattcataatctttaaaaccaatatatcggaaaattaaaacatctcctttttgagccttaatgctaaaataaccatttccatcactgactgtacccaaggttgtcccttttactacaatattaactccagccaacggaaaaggaggttctatattttcaagaacctgtccttgtatagtccaatttctatcgtcagcaatattgctgacgatatccgatgcatcggatatctctttccgggcgattgcgatataatcctcaatttgtttaaaagaataaccgtcgcccaatacagagcgtaatgctgtcaaaatatcagaagtctggatatccaccgataccacctggtccttttgaagttcatcactactataggctattttcactcccgattgtttcataatagcatccagaacttgctccaaacgggcgtctttaaaagataaattcaacgtgtacttttgctctaaaagagtggttgaagccgaaatatccggcgaaatacttaataaattgatgagtaaaaataaaaataacgagtgctttaagactttttgtgcatacacaaaagccccatatctacttttttccataaatttgtatcttacaggtttaaactgagttataaaaatgtttagtaatctgttacgggagacagtatctggtacatactgtctcctttttgtgttttcatgatatctaagtcatcatacctcctctcttttttgtttaacataaatgatatttccttggcttcgttccaattttacatccgacgtaaaactgatcaactccaataattgctccaaactgattttccggtctatgaccaaagaaaaacgcttatctttcaactgttcattttgataccggacggtaaaatcataccaatgcaacaacttattaaagatttcctctaacgcggcatctttgaaaatatattctccttttacccaagatgtatataaatccgtgtctacaacccgtatcccggacttacggctttccttattataacagaactgctcggaggggacaatccggaattcttcgccaccattcgcttttacagccacagaacctcctaccagtgtgacacgagccatttgctcggactgataagccgagacattgaaagaggttcccaaaacctggactgcgacctcatccgtcctcaccacaaaaggacagtccggattcttagccacatcgaagaacgcctctcctttcaaccggacctcgcgcatttctcctgcaaagcgagtcggataagataactccgattcagcattcagccaaacgtgtgttccatctgccaactccagttcgtaagcattccctttcggtatcaccaagtgattccaagacagcttttcttcatctgaaggctgctcccggtccgactcatacgaaagttgtccaaccagattattccgaatcaccatattgccctgctgaatcgaaaaactatcctgcttcaacggaatccgttccccattatccaacagtaaagtcggttgatttatgtttttcaatacatctacctcaacagtccaatcctgctccgcagatctgttcataaaataaagtcctacggaaaacaaaatagcgaccaaggccgcataaggcaaccaaccttttaagttaaactttttcttcttctctacagtctggttgcgtaccctcatccaagcctgttcaacatcatattcagaatcatcctgctttccgacagtctcgaaactgcgatatagttcacccacttgctcgaactgccttctgttggcttccgaacaagcaagccattcattcaacaggcgatgctcgtcttcggtcgcatcttcggacaggacagacaacatgatctcatatatcgtttcagacttcatttgcaataccttttattatatgacaacagtggacaggaaaatgggtaggaaaaaataaacttttttcatgtatctatgacaaattcagtctgcatgtaatttgtttccggcaatgccgaacatatattcgtatatcttcgacaatgtcgaacagctacacgacaacgtcaaaaacaggtttcattagcataaaaagcaagactgttccttgtaaatcaatcaattcttcccgcataattcgaaaagcttctcccaaatgatacttgacagtattgaccgatattccggacacttctgctatttctttatatttcaatccttttatacatttaagaagaaatacttgtttacatttagggggtagtttacgaagagcctcccgcacttcttgtttataccggaaatcattctcctcttcagcttgtccattccactcttctacaagcgaggccagaaaactttctttcgataattcagctttatagtaattcaagcagcggttatagacagagcgataagcataaggcaaaaagttatccccgttgatcgtcaaaccgtctttttcccaaacggcaataaaaaagctttggacaatatcttctacaatttgtttatctgacaaataacgggatgcatagcggcacaactccgcataatacatccgaaataattgctcaaaaagtagttcattgaccatttttccattcaatttttcaatcttatatgataacttagaagtacaaatataatgaaaaacaagaaacaggagtgaaaaccatagtaatccatagggtaacctcatcaaaattcgggaaccgtatgaaatataccaaagaaaaaacaggaccttatcatacaagtttttctcattccctctgtcactgtatcactgatttctttctatcagttgatattcaaattgtttcattagtgatatatgcccgttttctctatcactgccctatcactgacaatcccctgtctcgtcctgattttggttgactgtgtattaaaaaaatcctgttataggttgtctataaatgtaaaaaaacagacaatcctttcttaatcctaaaataagttaccttatcctgtttcactacaggacagggggcttttcacagccaaactcatcggccggggagcgcccaagcggcaaggggcagggccacctgtcccgacgagcgtttccggtctctgttctattttgttgcaaatatatcagtttaatcctgttcataaaagaatagcttgtttacgtttataaatagttttccattttctttttaaaggccccttcttcgcatgcgcctcttcaggtgtcaacatttccacactactgtgagggcgccgggtgttataaatatcgatcactttcctcactatatcccgagcctggccgagcgttgttatcatttctttattcaaccattcttcttttaatattccattgacacgttcagctattgcattctctctgggatctccgttttctgtcatacttatacgacatttaatgccttgtaaaattgagatataatctttgctacaatattgtactcctctatccgaatgatggatcagatcgcttcccgggggaagtgtttccaaggccatattcaacgcttttatcggaccggacatctccagggaatcctccagggcccaaccgacaatcttacgggagtatgcatctgtgagcaaactcaaataatagaatcttccttcgacattgcggacataagtgatatcagctacatataactgattggctgatagtggatcataatcttttatcagatttggatacttatgaaaacggttccatgacagagttgttaccggccgataaaccctggaatgtctgatcaacaaaccattgtcgcgtagcaagtcaaaaaacttatcgcgccctatatccaaatcaggatgtatcttggtttttaggatatgatacaacttacgaccacctaaaaccggttggtcctgacgcaggctgtttaccattttaaggattatttcatcacacaacaattccgattgtaactgtttttctctcttataataggcttgcttgctatacccaaacaacgaacaacaatcagggatacttatttccggctgattgtcatgaagccttttcactgcttggtgccagagttttttcggatatcgatgttatagtgttcattggctagttctattaggatttccatcgcacggcgatgagcttgctcatgcttcagttccttctctttatcctttaactccaactctttttgtttgagggcgcgttccagttctttgatccgtttggaaagatccgattcgttttctgtcatttttattgatcgctttttgagtttcagtggttttattgacactgatgattgtctttttgcctcaaatttacgaatccaatgcgatattaccgtagggtcgcttatggaatatttaaaggcgatctctttacggcttactcctaagcgatattcacctatagctgctaggcgaatctccaaaggataaggttcacccttgcgacgagtcaatgacttctcttttttcatctttgttgacttttatgaagtcaacctatttcaggacgagacacactgtctcccatccctgcaaatcactcgattattttatgcaaaaacgggtgtaaaataggtaaaaccgggtgttttttattgttcagcacggcactttagttgccggacacccccatgttgccccctcttacacccgggtgtagaggggcgatacatccgggtgtaaaggatggtaacatgggggtgtttacggaattatgtacttgtctttactaaaaaaagagagggcttttgtggaatgaagaaccgtatttcgtcgatttactacctgccacattcgtttttacatttgtttattcgactcttttatatgctttttcaaaaacaaaaagaggatagtacactgattcttaatcatatataaaaagctccatatttcagaagtgatagaggagtgatagaggaaaacgtcttgtatcactgcctctgacgcttgaatatgaatagctacaaccttcgttgtgatagagtgatagaggatttgcagaaaactttgtgtgcggatcacgcccttggaaaattttgatgcggttaccttgagccatccataatgcttttgttaaaatcgaaattaaattatatgttatagaacatatttcttacaaagatgttatctttgcagcggttatctaaaagacagtaagaatatgctaatagaagcattttacatcctcttcttctattttacaggagagtttatcagttattttatcgacgggtttatcccaggtagcgtaattggaatggtgctgttattcctggcactggcattcaaagtcgtcaagccgaacaaagtgaagaagctctccacgcttctgaccgaaaacatggggttgtttttcctgccggcgggtgtgggattaatgaattcgctcggtatcatttcccagtattgggttgtgatcgtaacagcctccgttgtcagcaccatactcgtaattgccagcgtagcactcatccagcaaaaattaggaaaggaaacggacgaaaatgaataacctggcacaatcggaagtattttcactgactctggtaatcggtacttatctggcttctttggctttgtacagaaagacgcgtatcagcctgctgcatccgcttattacctccatatttgttattatcgttgtcttgaaaacgatggatatcgaatacgaatcgtttcagaaaggcagccatctgatccatttcctgttggggccgtcggtcgtggcgttaggatatgtattgtatgagcagatccaatacctgaaaggaaatgtgatttcgatcctgacgtccgtctttgtcggagcgattgtcgggattgtcagcgttatagcgatcggcgaactgatgggagcagatgccgcgttggtcgccacgctcgaacccaagtcggtcacgacaccgattgcgatgggcattgccgagaagtcaggcggcattccttctctgacagccgtcatcgtagtggcggtcggaatattcggcagtattgtcgggccgttcgtgatgaaagtgttaggcatcgaaagccgcatagccaaagggttggcattgggcgcctcttcgcacggggtaggtacttccgttgcgattcagatcggtgcggtggaaggagctttgagcggacttgccatcggcctgatggggatcatgacggctatcctcgttccggttatcagctttattatctcgcttttttaacttcccgttatcccggacttgatccgggatcgtatttagcccttataccccctctgcatatcaaactgatttgcaacctatttccaaataaaattacagaagtttattgttactttaagaggaaaacactacttttgcacccgaaatccatcacgagataaattaacaatataatataaagaacattagtatgattaattcacaggacatcaagaaaggaacatgtatccgtttggacggtaaactctatttctgcgtcgattttcttcatgtaaaaccgggaaaaggtaacacgattatgcgtacaaccctgaaagacgttgtaaaaggtggtcagatcgaacgtcgtttcaacatcggtgaaaaactggaagacgtacgcgtagaacgtcgcccgtaccaatatacatatcaggaaggcgaacactatcatttcatgaatcaggaaactttcgacgatatcatcatcgacaaaaacctgatcaacggtgtggacttcatgatcgaaggccagattgtggaagtcgtttcagacgcttcaacagaaactgttctgttcgcagatatgcctgtaaaagtacagttgaaagtaacttatacggaaccgggtatcaaaggtgatacagcaaccaacactttgaaacctgcaacagtagaatcaggtgctgaagtacgcgttccgttgttcattgaagaaggtgaaatcatcgaaatcaatacacaggacggttcttacgtaggacgtatccggtaaaatatatgatttatgatttatgatttatacgttgacaagataaatcataaatcataaatctaaaatcatccaaaactttcttgctatgaaaataaaagaatgggcagaagaagaccgcccacgcgaaaaaatgttattgaaaggtattgcttccctcagcgatgccgaattactggccattctgatcggctccggcaacagccgggaaactgccgtccaactgtcacaacgtattttaaattccgtcaataataacctgaatgctttaggcaaattatccgtcaaagaactgatgtttaagtttaaaggcattggcaaagtcaaagctatcacaatcaatgcagccctcgaacttgggaaacgacgtggcaacagcgatccggttcaacgtcccgttatccactccagcagcgatgtttaccggattttctatcccctgctctgcgatcttccccacgaagaattatggatcgcactcacgaaccgttcttccctggtgatcgaaaaggtcaagattagccaaggcgggataagcgagacatcagccgacctgcgcatcattctgaaagccgcgatcaatgcccttgcggtaggcatcatcctctgtcataaccacccttcgggcaatccccgccccagccggcaggacgacctgctgacacaacaccttcgggacgctgcccgcttactcgaaatacaactgttagaccatattgtcctggccgacggcagctactacagttattcggacgaaggaaccctgtgagataaagctatgctttacgaagggtaactctatgcattagccatcgtaaagctatgggttacgaagcagaagccaccctttcctgttattaattgtcaattgtcaattgtcaattgtcaattaattcgtacgtttgtattcaaattaaagaaatatgaacaacgaattcctccaaacagaagaagcgattgtcgccatgcttaaaaccgtatacgacccggaaatcccggttaacgtctacgatcttggcctgatctataacatagaggtagacgatgagaagaacgttcgcatcgacatgaccctcaccgcccccaactgtcctgccgccgatttcattctggaagatgtccggatgaagatagaatctgtcgacgacgtgaacaacgtggaagtaaacctcgtgttcgaacctgaatgggataaggacatgatgtccgaagaggccaaacttgaattaggttttttatagagacatggattcccttcgaaagaaaatatattttgcatcggacgcccatctgggtgcccgcttccataaagacccgcttgccgtcgaaaagagactggtacgctggctggacagcatcaaagacgaggcaatggctatttatttcctaggggatatgttcgactattggtatgaatataaatacgtcgtaccgaaaggctttgtccgtttccttggtaaattggcggaactatccgataatggagtggaaatccatatatttatcggcaatcacgacatctggatgttcgactatctgccaaaggagataggtgcgatcatccaccgggatgtgctcactgtagaccttttaggcaaacggttcttcctcggacatggcgacgaggtagactatagaagcaaggcattccgtttccttcgcacccttttccgtaataaattctgccaatggctgtatgcgggcatccatccccgctggacgttcggcttcgctctcggctggtcgctcagcagtcgtaaaagcggattaaaaaaacataagacaagggaagcagccgaataccagggcgaagaccacgagtatatggccctctttgcaaaagaatacctcaagacacacccggatatcaacttctttatcttcggacaccgccatatcatgctcgacttgatgctttcacgtaccgcgcgcctactgatcgcgggtgactggatgcaatatttctcctatatcgtctgggacggggaaatgctgtatatggagcagttcgaaacagagtaagaagagaattagtttttactaatatttatcgttacatttgtataatcatactaaatagaaagacgatgcaaactgaactctccaatataagcaaaatcaagcatgcttcacttcaatagaaattggtggcttaacagtcattaccggaattaacgattctggtaaaagtacggcaggtaaagctttgttctgtgcaatcaaagctctatcaagcagtgaaggagattcttttgagtacaaaacccgtatcgttcgagaatgtattaatacccatcttaaatcaaacaacggaacagcattaataaacgatgcattccaaagagccattgattccgaatttattcagaacatttgcacagaaggggcggaacagtcatctgtcatattatccgatgagacaggacaatgtctttttacaattcaagacaatcaggttgtcagatcttttaaagatgaaagtttctatctaccccttgtttattgtaaagattttgaccgtttcattttataaaaaaagaccgccccaaccggtgtcggggcagtctaaacactaatcctaatgttttgtaagctgtgaggattagaataattattatttacctaatatatccattgtatcggcagcgatcatatattcttcgtctgtcggaaccacaatgatcgtaaccttgctgtccggtgtgctgatgaccatttcttcaccacgcataccttcattcttttcaacgtcaatcttcatgcccatgtattccatgttttcacaaacgacacgacgtgtcgcccactggttttcaccgacaccaccggtccaaaccaagatatcgcaaccacccatggcagcagcgtaagcaccgatatatttcttgatgcggtagttgtaaacatccaaaaccatagtagcacgttcatcgcctgcctctacggctgcttccaaatcacgcatgtcagaggaaccaccgaccaagccggcaaccccactcttcttgttgatcaagtctgataaaccatgaccatccaatccttctttttccatgataaaggaaagagcaccggcgtctacgtcaccgcaacgagtacccatcagcagaccttcaaccggagtcagccccatagaagtatcaacacatttgccatgatctacggcagcgatggaaccaccgttgcctacatgagccgtaatgatcttctgttcttcataaggaacgcccaggatttcgcaagcgcgacgggaaacatagcggtggcttgttccatggaaaccgtaacggcgcacaccgtatttcgtatacatctcgtaaggcaaaccgtacatataagccttagccggcattgtctggtggaaagccgtatcgaatactgctacctggggaatacccggaatcaacgcttccatagcatcgatccccttcaggttagccgggttatgcaacggagccagatccgaacattcgattaccttgttgatcacatcccggtcgatcttcacgctggaagcgaacttttcacctccatgtaccacacggtggccgacagcgtcgatttcgttatattccttgatgcagccgtatgtcttgtcagtcagaatactcaggataaattcgataccttccttgtggccgggtatttctttttccaaaacaactttcttaccgtctttgtcggtcagtttcaggaatgcaccgggcagaccgatcttttcgataccaccctgtgccattacttcaccggatgtcatatcgaacaatttatatttaatagaactactaccgcagtttaatactaatactttcatgatttaatgatttatgagttgggattttaggaatttatgaattatgatttatcatcgtcacataaatcataattcataaatcaaattatttattcgctttcaaacctatcgactggttacatgcaatcgcaaccatcttatagatatcgtcaacagagcaaccgcgagacaggtcgttaaccggagcagccataccctgcaggataggacctacagcttctgcacctcctaaacgctgaaccagcttataagcgatattgcccacttccagagtcgggaataccaaaacgttagcctgtccggcaacatcgctgcccggagccttcaatgaagcgaccttttcaaccaaagcggcatcggcctgcaattctccgtcaaccttcaggtcgggagccatttcttttgccagacgggtagcttcgacaaccttgtcgaccatctcgtgagaggcactgcctttcgtagagaagctcagcatggcgacacgcggttccattcctacgatatcgcgggctgtagcagctgtagcaatagcgatacttgccaattctggtgctgtcggattcggcattacggcacagtcggcaaataccaaaatgccttctttaccatactggggagtctttgtaaacatcaagaacgcacctgaaacgcaactcatacccggagcagtcttgataatctgcaaagcgggacgcaacacattgccggtcgtgttctgtgcaccagcgatttcaccgtcggcatcaccggatttaatcatcaggcaggcaagaaacaaaggatcttctactaaaacggcagccttttcgggagtcataccctttttctggcgcagctggaaaagcaggtctgcgtaagcggctttcttttcgtgattcttcggatcgataatagtagtttgtccgatgtggttcaacccgtactgagcagccagactgttgatttcagcggggttgccaatcaggataatgtctgcaacttcgtcggccactaaacggtcggcagctttcaatgttctttcttctgttccttcaggaagaacgatacgctgtttgtttgctttagcgcgtgcaataatctcttgcattaagtccatagcggaagatctgtttttattatattgttagttagatatcacaataatcgggtacaaaagtaggcaaaatgcaatatagagtttgcaaaatcagtaaaagatttacatgcagacctatcagtttcagaacatttaacaataatttgttacttccttctcccctgacaggatttgttgcaaatcctctgccgtaacgttcacttctattttaccattatgagcgaccgatatcttcccacgttcttccgaaacgatgattaccagtgcatccgtttcgagcgacattcccaagccggaacgatggcgtaatcccatatctttcggcaaattagcgttttgggcaaccggaagaatacagccggcagccttgatacggttgtccgcaatgatcatggcgccatcatgcaaaggactgtttttgaagaatatattttcaatcaggcgggcattggcatcagcgttgaacatttcaccggtatgctcataaacggtcagatcgacatcctgctggatgcatatcagtgctcccgtctttttcttcgccatattcatgcaggccagaacaaccggggcaataaacttcccttcgttctccttgtcatggttcttcttcgaaaatatttttcccaggaacttccatcccctgtgcgaaccaagtgccaccagaaaacgacgtatctcatcctgaaacaaaatcaccagtacaaggaaaccgacactgataaacttgtcgagtatcgctcccatcaaacgcatctccaacacttgggaaaccagaatccagacaataataaacgacactactccactaaagatagccagagttccggaattcttcatcagcttatatgtctggtacaagaagaaggctaccaataaaacatcaatcaggtcttttattccgaaattcatccacataatattaacagttgaaagttgaaagttgaaaattgaaagttttcgaaacgagtttgactgcttctactgcggcttttacgtcgtggacacgaaggatatccgtcccattcaacaaagcaatcgtgttcaggactgtcgttccattcaggctgtcggctggtgttccacccagatatttataaatcatgctcttgcgggaaacaccgacgagcaaaggtaaaccgaaatccttaaactcacgcagatgtcccattaacgtataattctggtctaccgtcttactgaaaccgaaaccgggatccaatataatatcgttcactcccaacaaacggagctgtcggactttccgggcaaaatagagcataatctcctccattatatctgcataatcggtatgttgctgcatcgtctgaggagttccacgcatatgcatcattatataaggtacatgcaaacgggcgaccgtctcaaacattccagcatccaactctcctcccgaaatatcgttgattatcgcgacgccgtattcttcgacgcaacgacgtgccacatccgcccggaatgtatcgacagacagggtcacatccggataatgcgtattcagtattttcaaggcaaaagccagacgtttcatctcctcttccggtgagacctctgcggcatcggggcgggaagaataacctccgaggtcgatgatccgtcctccctcggataaaattgcctgtatgcgttcctcaattgcaacttccgtctgcttcctactatcggcataaaaagagtcgggagtgacattcagaatccccatcaccagcggagtatcgagtgaggtaagcgttcctctaatattgagcgttttatgtaacattcttatttttctttccgacaaagataaaggtaaatacattaaatcactacatttgcgcaaaataactctcatagaaattataaagggaaaaagactatgactattcctgaactatatgaattgtttatacacaatccgaaagtgacaaccgacagccgaaactgccctcgcggttcgattttctttgccttgaaaggggataaattcgatggtaaccaatatgcagaaaaggcgctggcatccggttgcgtgtatgcggtaatcgacaatccggattattttataggagaacgcacaatccttgtggacaacgtgctgacgaccttgcagcaattagcgcaccgccaccgtaaagtgatcggctgtccgattatcggtatcaccggaacaaacggaaagacaacgaccaaggaactgctggcttccgtcctgtctaccaaatacaaccttctctacaccgaaggcaacctgaacaaccatatcggcgtacctctcaccttgctccgcctgacgcacgaccacgaaatggctgtgatcgaaatgggagccagccatccgggcgatatcaaagagttggtcgacatagcacagccaaactacgggattatcaccaatgtcgggcgtgcccatctggaaggtttcggctcattcgaaggtgtgatcaaaacaaagggtgaattatacgactatatgcgccgcacgaaaggtaagatattcatcaatcaggataataaatatctgaaagagatcgccaatggaatcgaacaggtcacatacggttccgatgaaacggcttttgcctggggatgtgtagtcagctgcaatccctacctgactttcgaatggagacaacagggcaaaatccacacagtggaaacccatctgatcggcagctacaatctggacaatgccttagttgccgttgctgttggccgtttcttcaagattccggcagaacgcatcagccgtgccattaccgcttacgagccaactaacaaccgttcacaactgaaaaagactgaaaataacgaactgatcatcgatgcctacaacgcaaatccgagcagcatgaaagtcgctttagacaatttcgccacaatgcctgtctcgcccaaagctctcatcttaggtgacatgcgcgaattaggtcctacaagcgacgaactccataccgaagtcgtagcccggatcaaggaaggtaattacgataaagtatttctgtgcggcgaacatttccaaaaagccgccggaaaagacttcaccacctatgccacaacagaggagctgatcgaagccttgcgcaaaaatcccttggaaggatatcatgtgctgataaagggatcgcacgggatggcactggagagggtggtagaggttttataaaaatctacaaatccgattcacatgaaggaggtacatatctctgcaaagagatgaatttcgattgcgaaaacaactgtcataccatcatgctttgccttttatataatgaatatcaatctctacatagaatgatagcaggcatgatggatgtttttttaactatcatactatcatagatataatagctttttcacacacaacatatagcttattatcagcaatatagctatatatttttgtcgagatccgggtgtcacccccctgcagacccaggtctcaagaccgctcagatgggggtgtaaatggacctgatacgcgtattttgaggaaaagaactaacgtcttttgctttccaaagtaccttattccggcaaaaaaggcttatacattctcaaaaacattctgttttaacacttccaaagtacatctatttccgataaaaacgaccaaaatgatggttaaacagctgatttatgatagttgcatgatagttgaaatgagaactatcatagctgtatatcttgatattcaaccttcacacaagaaacatgatggtatgatggtatgatggttgtttctaaatcaacattcatagattcaaatattcttatataggacaatgtcaatgaacatgtattagtccaataaaatcaagccggaacttgtttttccaaacaagtatccggcttttcttctatttttaccatgaaatagaaactcaaacaataggttcccagcccggttcatacgtgcggctccacaagcgttgagcttccggatcgttcacaatatgaccattggaagggtcgatcatcaagcgatgacctgtacgccaggcaatattacccaactggactaacaacgtacttttatgtaactcttcaatgtctccattcgggcgccggtttgtcttgatcgcatcgatgaaatcggcaatatgtcccatatccaagttagcactcggactgttcgggtcacgaccgtcaatgacatcctttgaagcaagctctttaaccagcttgttcttcatatcgaaaatgcgatacccattatgacctgtttccaacgctccaccttcaccatagaagatcacaccacgatcacgtccttccgtatcgcgggaattacaactacgtccctcccaagttacaaggcaatcatcgccgaaccggatatcgatcgtctgcgtatcaggagtttcccaatcatccttatatcgaaaacggccaccttcagagctgacggctgtcgggaaatccaaccccaatccccaacgaacgacatctatctcatgtgtgccgttgttcaatgcctcgcctgttccccaatgccagaaccaatgccaattataatgaatcaggttatcccgataagaacgacggggagccggtccctgccacaaatcaaaatcaatcgttgatggagccggcatttcttttccgaaaccgatcgatttacgattattcgtgtaccaagcttttgcaaaatgaaccttgccgatgacaccattgtgcagtgcctcgatcccttccgtcagtcccggccaggaacgacgctgcgcaccgacctgcacgacacggttatacttacgggcggctgcaaggctcaactcaccttcgtgaggattatggctacaaggtttttcacaatagacatgtttacctgcctgacaagccataatggttgcaggtgcatgccaatggtcaggagccgtcaccagtatggcatcgatatttttatcttccaatatcttacgaatatccttttccgtcttcggattgcctccaactttctttacggcagcaaccccttttgccaatgctttttcttccacatcgcaaacgtaacgcatttccacatccttacgactttggaaattacgagccataccggcaccacggccattggttcccataacggccatattcactcgttcgttcgaacccataatattcgcataactcttggcactggtcgctttgaacgacataccgccgatggtcagacccacacccgttgcggcgacttgtttgataaagcctcttcttgttgttgtatttttcatgtctctgtttgttttttaattatttcaactttctgatttttacatttttaaaagaaacgacatccccgtgatcctgcaaaagaatatgccctttttccacatctccaaacataggttggcaattcttatacttgctcaattgccaggtttccttatacaattggctgctacggtcgaatgtcaggattttctttccattcaagtaatgtgtgactttcgaacctttagcaacaatacgggcctgattccattcacctatcggatttacctttttagcggatgtcgggaacatatcataaaggccaccttccaagcgatttccgtcacgtcctaatttcccgtccgggtggttttcgtcatccatgatttgatactccaaccctaaccaaccccctttttcgtacttggtgaagaaatatttaattccgctattggctcctttcgtgatacggaaatccactttcaggtcgaaatccgaatattgtgcacgcgtaatgatatcgccacctcttttaccatcctgtttacgaaccgtcattactccgttttcaatctcccagccgaatgcaggcgggacatctttcccgacagaagtccatccatccagattctttccattaaatagcagcacccagccctctttcttttccttggctgtaagctgattgtcttgtgcctcgacacttcctgtccacgtaaacagaagtgcggctaaaaatacaaacacttttttcatctccatttctattattttgttcttactacaatgaatttcaaacgatctcctcctgccttttgaatactatgttttgaaccaggaggacaatagcaggatgaaagcgcttcaacaatacgtttttcatcgttaaccgttacttccgctttcccttccagtataaaaaagacctcctgcccggcataatcgtcttgcttgtatagatgtgaatccgaaaaaacatgtaactgagcattcaaacctccagccgacatttcttttgtcagataccacatatttagcctcccgccttttggggtatgaagcgaatgatcaaaggggatcaagcagtctttcatagaataattctttttccccggtaaaaaaggttttgacaattttccccgtatctcacgcttgaacataagatacctgatcggtttatcgtctacccttcgaatattatgagaagagcttcccggagcataaaaggcatccccctgattgagaacatgctcttcgtcattcagatgaacgacggatgtcccttctaccatgtaaaagagttcgtcttcaaaatgagaatgaggttcatgtgtctttattcccttatccacacacgacatctttactgaaagagtatccgcaattccgtcagcaggaataaaccagaaagcccagcctgtcttattcttaatcacacgctcatctgaaaaagaggttatacaatccgatattgtgtaccttttctcatttatttgtgcaaaagatgtacagacggccaataacaagaagcttaaagcaacacttattttattcatggcattagcaaattatgagtttataatgagggtgcaaatacaccctcattatatcaattacaactgcgtatatcccttattctggataattttaccaggattagactgcatgacagtcatcggaataggataagcaagagcatcatcactccaagtaaaatcggaataaccgtcaaacttttgttcagcagtcatcacatcctttgcccgtcctgtacgcactaagtcaaaccagcgatgattttcgaaagccagttccacgcgacgttctttttcgatagccaataacaggtcgttggaggttgagaaatctgaaagcgtgtaatcccgtaataaatccgcagcaggtgtaatgtccggatctcccggcgtattacgtgcacgttctctaattttatttacatagtcaatagcagtctgtttatcaccattcgtacgaacaagtgcttcggcatataaaagataaatatcagccaaccgcaattcgatccagttgttatcgttgtccgaaccgcttgttgaaacatcataatatttgcagacatatttttcattttcccaagctcccgtcttcgcattcgtccaaccgtcacgcatggaaacgtatttacgcggatcacccacttcataagcattggacatatcttgcgtaggggaattttcaccacctttatctcccaccaacacaacttctttatcagaaaaacgaggtgcaaagttattgttccaaggactgccagtagctccgccttgcgttcctttcttatattggacctcaaaaagcgattccgacgtgttcttgttggatacttcaaacaaatctttataggttgggaccaaagaataacgagaattaccaattaccgatttaaattggtctattgctaatttataatactcctcccctttattcagcggatagcctgccatcgtcatatagactttacccaataaagccgttgctcctcctttcgtcacacgcccgatatcagtagagccgtatgattcaggcaaattactttccgcatatttcaaatcttgaattataagatcatacatttcctgaagagaaactcttcccatgtcataagcttccgtttgtgtgatctccctatcgactttaatagcaccaagtaattcaccattcactccgtatccaccgaatatacgattcagataaaaataaattaatgcacgcaggaatcgtgcttctgccgtatattgagctttcaatacttcacttttaaattcaatattttcaatccttccaatcacgatattgcagcgcagaatcgttttataactatcatcccaacagctggccaagaaattattttctggcaataaaggagatgaaaattcatcaattcctttttcatttgccggatttccacttaaccaagaataggttgtgttatcagagcgaatttctcctaatctgacatatgtttggttataaagggagcgtaaattcgcataagcggacaatactgcctggttcatatcggtttcagtcttataaaatccttccgagttaagatccgaaggaggatttttgctaatgaaatcatcactgcaagacatacataaaacagataatacaaataacaaatatatctttttcataatgatatagtattaaagatgattagaacgtaatattagcaccaattataaacgagcgtgcagccggatatcctaaatagtcaccaccttgcgcaagaccactttcactactggtttcaggatcatatcctacataattcgtaatcgtaaagagattttgtcccgtcacataaagacgcagtcctttcattttcatcttatccaaaactttctggtcgaaattatagccgagcgtcaagtttctcaatcgcagataagatgcatcttgtacccaagcagaagaaggatcacgttgccaaccagacggtgtacgggtcggacgaaaatgtataccatcacccggttgatctttcgattgccaacgtcccaattgttcgatcataccgttacggtcgccatgatagattccgcacatacgtttgtaaaagctgaaaacttctgctccataagaacctgtaaactgaatatccaatgtaaaattcttataactgaaagagttgctaaatcctgctgtaaacaacggattattgtctcctaagatcgttttatcattctgatccagcactccatctttatttacatcctcataacggccatctcccactttgtcgccacttaaatgtggatatttagccaattcttcttcactctggaaaactccgatatatttatagccataaaaactggcaatcggatacccaggctttgtgataaatgcattattcgcatttgcagcacttccatatataggacgtccatccactcccacttccaacactttgtttttattaaacgaaatgttgaaattactggaccatgcaaattcgcctgtcaaatttttagtattcaacgtgaactccataccccggttctgaaccttacctatattttgcatctgggtagaataacctgttatggtcggtacaggaacattcaacagcaaatcgattgattggctgtcataaaaatcaccttccaagcgaatccgattattgaacaatcctaattcaaaacctaaattatattgacgcgtacgttcccaacccaaatcatcattcgccatcgtactaggattaaccgcattctgaacagcatctcctgttgggtaaaaacctgtagacaacaaaccgatagcagaataattaccaatccggttattaccggaaataccgaaacttgcacgaatcttcaaatcactgatttgtttcacatcctgcatgaacttttcctgcgagatacgccatcccagtgaaacggacggaaaagttccccacttcgtgtttttaccaaaacgagatgaaccatcactacggagagtcgttgtcagcatataacgattatcataaacataattgatacgtcccaggtaagagatcatagaatattctgattcgtcactcgtcagagcatacatggttcctgcattcaaggtcgtgatattatcatttgcataccctcgagcttctcctttcatatgttcgtatgtatgagattgagtcgtatatcccaacaatgcattaaaactatgtttgtcagccaaagtaaacgagtaattcaaagtgttttcaatcacccaatcacggtctgtccaccgttcattaataccttttgctggacggggagccttcgaagaatcgaaatcaacataagaaggttcgaacttcttctggatattatcctgtattccaccattaatgctgatacgatacttcaaatttttaataatttcccactcggcaaaaatagttcctaaccatccgtgacgtttccgcttgttcatcacctgctcggcaataccgatcgggttagcaacatcaccggccaaaatttccggattacggaccatcgaaccgtacgttccgtcttcattatgcaaaggataaataggaggtaaattcaaagcatacagtacaggagagtcttttccatttgcctgctccgtcccatccgcactataggccatcaagctcatcccaacattcaagcaatctgcaattttggaagagacgtttgtacgaaaattaaagcgctcataatcagtattcaacacaataccatcctgactagtatagctaccagagaatgtataacgtgtattttccgaaccacccgaaaccgatagttcatactgttgcattaaagcattgcgatacagcaggtcctgccagtcgttatctggcatttgtgccactgaagccggatcaaggaaattatatttataactgcctgttccgtccggtatcatatattggctacttgctccggaataaagagcacgacgggagttcggatcattgatggaatgcggagactggtccgggtccgaagaaatgactttcgcatccagccaagcctggttacgtccgtcaataaaccattgtacatactggtcgcggttcatcatttcgattttcttttcgcgctgttgaaatccaacatatgcattcaactgaacagtcggtttacctatttgtcctttctttgtcgtaataataacaacaccgttagcacctctcgagccataaatagcagtagaagaagcatccttcaacacctgtatgctctcaatatcggaagaattcaacaaacgaaatgcacctccttccatcggatagccgtcaacaacataaagtggatcgttagactgcgtgatagaacctgtgccacgcacctttatcgtcagtccctcaccacctggagctccgttcgtttgctggatcagtacaccgggaacctgtcctgccattgcctctccaaagttcacagccgccctgtttttcaaattttcagaagaaactgaagcgacggcagtcgttacatccgactttttttgcgtaccataaccgacaacgactacttcatccagcatttccgtgtcctcacgcagttttacattaatgctttgcagatttcctactgtaacttcctgaggagcatatccaatatagctgactagtagaatacttttagaagaaacttccaatgtaaaattaccattcagatccgttatcgttccattagtcgtccccttttcgacaatattagctccaataacaggttcacccgtcgaatcgacaattttaccggaaatctttttcttgttctgggtaacagattgggatttctgaaccaatgtgatataattattttcaaatcgatacccaatcccagtactctcagctacctgctccaaataatcagatatctttgcagacttctttcgaaaagacacggtcttattgacatccacatcctgatcccgaaacacaaccagatagtcggtctgtgtctcgatttctttgaccagttgtttaatagtcatgctattctggctgatcttgatctcaatattttgcgcaccagcctcttctgccattaactggcacacacaaacaaacaaaagaaaaagtgatattctcataattctaaaaaaaactttaatgcggttattatgcacaataaaggactgtaacaaagtttttcttttcatatctttgttctaaatttaaagtgaatactaaaaaattacgacttgtgtttgctttaactcctgcggcagttgttggtagcttctgccgcttttgtttttctactgttctttcatcataggctatacatttttatgtttgacatgttcttattttaaggtcactatgttccgctctgtgtctttctctactttgaatttgcggatttgctgcaatacgcggaaaacatcgtcgagactgtcgcgctgcctgaattttcccgtataagtatctttgaataaagatgtgtcttttactacgatctttacgtcatagtaaagttccattttttccagaatattgatcaaaggttcattttcaaaggcatatataccgtcaagccataaaaaatgagctttcaggcgaatcggttctaccttcatctttccgttcgagacagtcacttgttgatccggttccaaaatgatcccgtcagattccttattccggaaaaagacgcgtacggaaccttccaacaaactggtttgtacatagccggtcgcaggatagctgcacacgttaaattgggtgcctaaaacttccatatcgacatcatgcgtagaaacaatgaaagggcgggaagggtctttcgccactttgaagaaggcttctccttcgatcgtaacattccttttatcatcggtaaaacgggctggatagatcaacttcgacttcgcattcagccaaacttccgtcccatcctgcaagaccagttgtgcccgctgtccggcaggagtgtacagagtattcatcacattctccgataaaaactccgcttgctcaggctgtgtataccaatatgtcaatatacttgttgaaacgaccaatatcaggatagcagccgcatacccgatccggcgtgtccaacgcttccacatcacggagtgttgcttttgcaaaataaagcagtcgtatttctgtttgccgattgttttatcctgcacctgatgtcctaagttcaacaaggcatatagattttgatactctacaaattcttttttgagttcttcactcgcctcgacatcgcgcagcagggatagtcgctcttccgtggaaagttcctcataaaagtatttatgtatccgttcgttcatattttccgcttttattcttaataaacggatcagggaaccaaaacccccaagaggataaacggatttttttaattagcgagtaaaaatattaataaagggagatagtctttcaattcgcttttaattttcttataggcgatagccatctgattttcaacagttttaagggaaatattcaattcagcagctatgtctttctgttttttcccctctattttgcttttgataaaaatttcccgacatttttcaggcaaagagtctaccacttcagtaatgatccgttcgatatcctgctcggagagtagagactgatcgaataattccaaggaggcaagtttcatccgcaaagtagcctgatactcttcctgtatcaggttgacagcttcctttacaacaatgcggtgacgtaaaaggtcgatacaacggtttttgatcgaagtaaaaagcagggcaaccagattcacatcataagccaagatctcttttctttcccacaattcggtaaatacgtcctggacgatattttctgcgtcttcttctgacacgacatactccagagcgaaatatttcatccgggaaaaccaagagacatatatttcttcaaaatggtcggatagtattttcttttcaaccagcatctttcttctgtgtgaataaaatcacggcgttctcgatctccaaactttaatctttaaattattatatagagtgtgagagctgtgacttatctatcaaatagggctctggaaaacctttgggagtaaataagcaacatactcccacaccatacttacggatacgatgcgggatatgctaacccattcttccccctttcaaattttccagatttttatttgaaagaatcagttaaacaacgcaattgtgctatttgcacaatgcaaatatagtaatagttattggttagacaagtaaactgtatattgtattcaagacaaacgtatctaatttttagtcgatagcagtgtataaagtacaagaacttccgagagaaggaacctataagttctccaaacagcgtttctcggatctagtggaaacaattcgcatgatagggcatgagttatcagaaatttccattgtttgagcctatgacaaactattaatggcaagtttcattattcaaactggcgaaggaagagctaaaaatattcatagcaacaatttatttcttgtttttatatacttttgcagcctgattaaataagtaatatgaatacacataatctttgttgcatcggccacattacgttggataagattgtaacgccgaaaaggacactgcatatgccgggaggaacatctttctatttcgcgcatggaatgagcaaattagatacttccgacttcctgttggtaacagctcttgctgtcagtgagatggacgcggtggaagaaatacgcaggaaagggatcgatgtaaaggttttgcccagtacccattccgtctattttgaaaatacatatggcgagaaccagaacaaccggacgcagcgggtattggcaaaagccgatccgttcacagttgaagggttacaggatgtcgatgcccgcatctatcatttgggaagtttgctggcggacgatttttctttagatgtaatcaaatatttatcgaccaaagggatgttatcggtcgatgcccaaggctacctgcgtgaagttcgcggtgagaatgttttcgccgtagactggccggaaaaggaagaggcactgaaatacatccatatcctgaaagccaacgaacacgaaacggaagttctcaccggatgcaaaaatccgcgtgaagctgctctgaaattagccaactggggcgttaaggaggttttgctgacattaggaagcatgggatctgtcatttatgccgacggcgaatttcatgaaatacccgcataccctccaacagagattgtggacgctacgggatgtggcgatacctatatggccggctatctgtacatgcgaaacaaaggagcttcatacaaagaagcaggatgttttgccgccgccatgtgtacaatcaagctggaagcctcgggacctttcgggggaacagagaaggatgtttgggatattatcgaaaggtataagtgaaacgatttatgatttatgagctatgtatcactgataaatcataaatctgaaatcataaatcaacgcaatttcttagccatcaccatataggaataaataaggactacggcatacccgaatagcggtacgacgaacgaaaacgacattgtcgagatatcggctacatagcccatcaataacggtccgacagcacctcctatcggagacatcatcaagaaggacgaagcacgcttggtatagtcacccaatcccctcagcgagatagcaaaaatcgtcgggaacataatagcctcgaagatatagcaggcaaatagagcacctttcgacagagtacctaaattcagggtaacgaacagagcacccaaaacggtaaagatcgcacagataaacaagactttctctgcccggatataactcataatccaactaccgataatacgcccgatcataaacaagcccaatccaccgaaggaaagaacgatcgctgcctcatgcgcatccatccacccatcgtcagtcacataattaataaagaaactgttaatcgatatttccgctatttcgtagcagaacaaggccatcaccccccaggtaaaacaacgatgtttccacaatcctttcaacccggctttagcctcagcagtcgtatcttcgcaatcgtcatggttgatctccggcaagcggatgcggaagaaaataagagcaacagacaggacgataacgcccatcacggtatagggcaaagcaatgttagcatctccgttgccggaaaacaacagcatcccaccgattacaggtgcacagatacaacctaacccgttgaaggattgtgccagattcaaacgactggctgccgtctcgcgatccccaagctctgtcacgtaaggattggctgccgtctccaagaacgtcagtccgcaaccgatcacaaacagggaaaagagaaagaagttgaatgacatcaactgttcgctcggaatgaaaagcaacgatccgatcccgtaaaggatcagaccgaacaccaccccctggcggtatccgtatttattaataaaaagtccggctgggatagccattgtgaaataacccgtgtacatcgttgcctggatcaaagcagaatgagccttcgtcatgacaagcgcctcctggaaatgcttgttcagcacatctaaaatagcatgtgcaaaaccccataagaaaaacagagatgtgactaatacaaaaggaaccagatactctttctttaccaacgatttctttactttttccattttattgttatttgttttatactcatcttattcatttaccggattgtagggaatcgtgaaccagaaagtcgagcctttacccaactccgaatccacaccgatcttgccatccaaagactgtatgatggactcgcagatggaaagccccaaccccgttccctggacaaagctgtcaaatttagcaaaacgttcaaaaacatgcggaatattctcctcggcaagtcctttgccggtgtccgccacataaaagcgcaggatagcgcctatcctctcatatcccatcgtaatagaaccctccgaagtgtatttgcaagcattactgaggaaattggagagaacctgtgtcagccgattcttttccgaatggatcacacaagcaacagacggcagatggcaaaccaaatcgacaccatccttcacacgcgacttatagacctgctgcaagttattaaatatctcggacaagtcgactgccgaataattgaaatccatctgcccggcttcgatcttcgaaaggtcgagaatatcattgaccaactggagcaaaagctcattattcgtctcgatgatcttgacatattcaccgatctcatccggctcttccgccatcgcaatcaggttcgagaagccgacaatcgcgtttaggggcgttcgtatctcatggctcatattggccaggaaagcgcttttcaaccgattggcctcctccgccttattacgcaggcggatcagttcgttcgtcatcttcaagtccgtaatatcgcgcctcaacccgatgagcttacgtatctttccattttcattccgtccatagggaacggcatgcatctcgaaccagcgatctcccagtgctgggaccattgtcctaatctggacctccatcacatggatctttccacaggcaaggtcttccaaacctttccgaagcaaatcacggtcttcgagatctacgaacgaaagatactcatccaacgaaattgtcattccttcgaacacggtagaccgcggcgagtagaaaatccgagtatccggattgtactcccacgagataatctgagcagcatcaagagtgaaatccaactgtagtttgttctcttcaagttcctgccgtctcttcatctcacccgttatatttctttccgtcccgataatctgttcgacctcgccagtcttttccgacttcaacccgattgcataggtttcgaaccaatcatagccttcaccccgccggaagcgaaacacttccctcagtttgttttctactcccctggacaggcgagacataaaccgactgtatttttctttatcgtccggatgcaataaatccagtgcacctttattgctcaaaccatcgttggcaagcgtcttccggtaaagagaggtgaatgtatccttctgcacatcatagcaccaagccgacagggaaccggcatcaagggcaacggacaattcccggcgtatatcatcaagctcgagttcattcctacgaatatccgtcgtatcaaccattgtagcaacaatatataggtttccctctttatcttccaagcgcgtcttagtagtaacagcccaacggacaggtaacccggtttcttcatcaaacaatacccggttaaaagaaatcggcttgtcgctttgcaacacccggttatcttcttccctgaaaagagaagctttcaaatcgttcacttcaaaatcattcttccccaacatacaatcaaaggcctctttataaaattcggagactttgttgttgtagaacagatagcggtactcattactcacatccttgataaacaatcctaccggcagattatccatgatcgattgcaggaatgttttcaaacgcaggatttccttttcggcaacgacataaggagtcacgtcatgggtaaagcagataaccgaattattctcaaacggcacaacacgtgcctttgtatatttgatccgatcctttttcccgtacttgcaattaaagacagtcacctcacccgtttcgaccgtccgcttcacatgcaagataatttcatccaacatctctttagcctgcggatattcaagatgaagatccttcagattcttccctatctggcatctcgtgtcgacatctttccaattgtgattatcagggttcacgatatccactatattcagatcgaagtcatagatggttgccatgtccggcatccggctcaaaagttccatcattttggtatttgccgtcttgtaagcgtcttcctttcgtttcctgtaatttaagataccaataaaaataaccaccatcaaaataaccaaacagacaaacaggatcacttctatcggatgttcttgccataatgaaggttcttcgttatagaacaccgtattttcaggcaacaacgaggggtcgatccctgaagctacaagcgtcggatagttgatatagtaattgggaagtgaaggagtgaactgaaaagccggactattttcgaatcctttcgtcagaacacaatgagtcagcaaagccaagtccttacccaaatcctctccggaaataaaatagccaccgatgtaattcatgttcgacgtgtcctgatccaaaacctgataaaccggcttggacgtataacgtgccagctcattgtggagcatcgaatgtgcatggggatattgaagggcatcggtataccatcccgccgataagatggcataggaatcatccatacaggcaatcgaatcgagtagttggggagtagacagcttacatccatccatatagcgaaggtcgagcgaatcgatctgctcgaaaagatcgttgatataagactcgaaaaacgccatattataacgattgtcataacaaaacgccactttgcggatatgtggctgaagttgttttatcagcgacaggttctcaatgacaaaatccttataggaatatcccgttattctgaaatcgccgaacgactctttcatcggcatcatatcggcaaccgaaaacagcttcttgtctttattctcataatcaatgaaggctcctttcacataacccaacacgacaggaatctcatgccagctatccacacaagtgacccgataggaagaccaagcctcattgcctagcagcacgaccacatccggctttaccttataggcagcaaaaagctgccgcatccatcctacccaggtttcaaagacgggagaagcctcgcagtccatatactcaacaaatattttcgcttccgaatctacctgcatctgatctatgaaagacgcaatcagatggtttccctcttccttgatcggagaataagagctaatgaccaaaaccttctgaccattgccgcttgtcgtccttgcctccacagggaaaagagaaagagtaaaaacaaataaaattatcagcagttcgtcgattatcaacttgccatttagcatcattatcccgttgttattagactatacctgcaaatgtacagcattttttcatttcaaggacctaatatgcttgtatttgagccacattatggcaaaaacgtcccattagccagaatacgatcattgacatcaagccaatgctaagacggataataagggagtgtcaaccagaaaatcgagcattttttcttctgacttaactttgagctccccccaagcattcgacgaccatctgagaagatgctgtttaaaaattacccacacatccttcctgacacataggcacatcgacttgaatagctttactttattacagtataaagttaccctactacatacctggcattcttccccatcaatcgataaatggaagctacgatcaaccaggaaatggcaaatgcgacaaccgcggcggcaggtatctgtaaagccaccggtacatgcagggcacgcatcagaacgacacccggaccggtaaagaaataatgcaccatatagattccgaacccacaagtcgtcaggtttgccagcaaactcttgatcttttcggatcgcacatccacctttttcatcaataggaaaacggggaccgtcatcatcacgacgttaagagaacaataggtaaagaaaagttccagcaattcttcgctgtattccggcagagcggttacatagcggaaaccgaaaaaagttacgacatagccgatcaaaaacatcgggatcccgaccaacaagattttattcagactccagtcgtgattgcgcaggtaatgtcctaaaagcagatagccgttgaacccggcaaaataatacaacatattgaaggagttccaggaacagcctccccatacataaggtgaaacgaactgatagtaataaggcaacagtgtcgacacgccccaggccagcaaaaaccatagcttggccttttcagaggctttttccacccaggcagagaaaacaggcaagtacaagtataacccgatcaatagatagatataccacatatgcacatctacaatcgagaaattcaatgggatctccgcaatatatctcaaggaaacatccaatgactgacgagccacttcttcgcccgaatagggaaaaaagtccaagatcacctccggtgacaagcctagcagtccggttatccaaggaaacaggttataaagcacagaccaaatcaggaaaggccaaaagacacggctgatcctttttttataaaagacggaagtatcgtccttcaatggcaacagcaaggctcccgtaatcatcacaaacagggggacacaaggacggagaaacgatccataagctgctccccagaacttaatctgatcgatattagctggtggttcacccggataaaagttaaacggatctgcactatggcaacaaaccacggtaaacatggcaacaaaacgtaccacatccagccaaacaacatgcgatcggccaattgccgaattctgactcttcatcataatattagcatcttactaagtttatattccaagctaagaaccgcccgccgtgcaaacggaaccagaaaagctttcattgctttatcaaactattaaaggatttgtccgctctataaaagagaaaatcctgacaatcaatattgtcaggatctcttgtacccagacctgatacaaaccatagaaatcacaggaaaacaaaaagagtttattctactaattatcaaccatttgcacatctcctgttttctccatttttgccctattttgcccgttttctgttattcagtacacttttagtacactttgaaatatcattttcttttgcacctttgcaatatcggaaaacaaaagaaaatcaactatttagtgtaattacccggttacggtacctaaatcgggataaaacctctaaacaatggcaaagttagaaaataaaacgaaagagaaccccaagttggagcaaaataagctctcagacggtagaataagcctttacttagagtattatttaggtagagaggaaaagcccgtattggatgaaaacggtaatcaggtgtattacgatagtgggaaaatgcaaggcaagcccaagtttgcagtaaagcataacaggcgaaaagaaaaccttagcctttatctgatagacaccccacgtactcctgcggaacggcaacagaacaaggaaactttggaactcgccatgcgcatacgtgcagagcgtgaacagaagtttaaaaaaagcatgttgggttaccgcttaaagaaagacagggctgttaatttcttggactactttcaagcctatatcaatagctataccaagaaagatattcgcatggtgcaaattgcgcttagccgtttcaaagacttcttgaaagagaagtaccccatgaatgttgcaggcacaagccgcacacgctgtaaaccttgcccttacttcccgtaactggctcatgggttgctatatcgtggaatttgagcagagcggagaagaccgtgccgcatacggtgaacaactgttgaaaaagctggaacaacggctgaaaacaaaaggtctgaatgaacgtagattccgtgaatttaggcggctgtaccttgtttatccacaactgaaagaacaagtattacactacatcatggcaggaaatgaaattcggcacacgctgtccaccgaattcacggaaccaattcggcactcagtgtgtgccgaattacaaacatcagaaatacaatataataagtggagtattcctgctgaaaggttgttcaataaattaccttattctcacttaaagttcatatccaaaatcgaaaatccgacaaagcgtgctttctatgaaacggaagcaatacgtggctgttggtctgcaagagaactggaacggcaaatatcatctttgtattatgaacgtagcggactctccaaaaacaaagaagccctctccgctttagtctagcaacaagcaaccctattacaacctaaagatgttatcaacacccctgttactttagagttcttaggattgaatgaacgagccttagtaacagaaaacgacttagagcaatccattcttgacaacctacaacacttcctgctggaaatggggcatggattctgctttgaagcccgacaaaaacgtattttgatagacgaagattatttctttgccgaccttgtgttctatcaccgcatcttgaagtgccacgttattgtggaattgaagatagacaagttccgccatgagtatgcttcacaactcaatatgtatctaaactatttcaaggcggaagtgatgcagccgaatgataatccgcctatcggaactctgctttgcacagaaaagggagatacattggttaagtatgccactgccggattagacccgaatatcttcgtacagaagtacatgatagaacttccaagcgaggaagaaataaaggagttcattgcttcctcaaattactaacctatcataaaaagtaacactggcgaaaagaagaatactgtttttcttttcgccagcaacatataatctgccgacaaaaaataggttttgtccgttttggatatataaacaaaggtatgaactaaacttgtaaatgtactgatttttacttgaatattaaaagttaatttattcaaatacaggaagaaataaattatttaatacgctattctattactcatttacattatatttggatgttgtttatataattggttgaatgaaatattttctatccatattatttatattttctctcaatcttgtcagcccacttttagcccaagacaagaattcggcagatatgtctgttttattagagaataaaatatggaaagtgcaacttcccaaagacaaacactatgctatggaaatggaattccgcagcgctggatggaaacagacctttctatatgatgaaaaacaaactgaaatatgcgattcttactctttgcatgaagatacaataaaatcttttcaaaagaattacattattcaagaactgacagatagtacgttggttctccaatatctgccggaaagtttgacaatcggagttacacctgtcagatgtacaacagataacagtgttcaaggacaaaggcagaacgaagaacgcttggatagtatttggcgtaaagaggatatttggaataaaggtgttgctaaaataaccggagaaccaattaaagatttatccacgatagaacctccccgatgggcggtatgggattacgatttgacaaaatactatgtttcccaaatgaaatacccagaagagttgctaaaaaagaatgtggcaggttattccgtagtgatgtttgctcttgacacattagggctaccacgctggaataccattttgacgaccatccatgaagattttgacaaagaggtcatcagactgaccaaagaacttccacactgcctgccttgcaggaacaaaaacggcaaacgaatggagtgtctttatacggtatatgtccctttcctgccccaacattatagggatagggtaaaggcggacagcgttagggaagaagaattgaaacaaagttttgtggaatgggaagctgtgtcttattttgaaaaagcaaatccgtatgcaattaccgactacattaatgaacgcctaacatacgattccaatctattaaacggtaaaaaagaaatcaaagggatttatacgatacgcattgattcttacggagaaataataaaggtagagaccttacgaggttgtggcatacaagaatgggacaaccaagtattgcaaatcataaaaggtatgccacggtggactcctaccatcaattttcatggtaaaggtgaatatcggaactctgtttggactgtacctgttttattcaagaatgatagtccaacaaaaaatgaagttaataactataattggcttatcaaaactctaagcaaatcatgtaagtatccacctaaattacagaaaaagaatcgagaagggatggtctatgttacatataaattagatggtaacggatatattaccaacccccaagttatttcgtgtaacaaccgaaaattcaaaagagctgcactaaatgcattcaatgctgtaacgggtatttctataactttaccagccccaaaggacactcttgtttttcaatttaaattggatagaccgacaactcctatcaaccctcatactgatgttttgataatcggctacagttcttgtgacactccaattctgatgcgatatgacgccacactgactgcccataccacagagccttatttggaggtgggtgttccggtctgttatctgaatgaacggggcgataccattgtgccatacggcaagtacagatactgtcaaacagatactatcaaaaaaataggttttgtttatgagaacaagccaaaggacgctcgaataatctgcatcaatgatgcgggcaaagaacttttctatgtattcaaatatgataatggtcccgactacatacaagaagggcttttccgtataatggacgaggatggattggtaggttttgccgattcattgggtaatgtaataattgaacctcaatttaagtttgcctacccatttaaaggaggaaaaaccaaagcaactttaaaaggtgaacgaaaggtagttcctgaatcagacggagaaaaacattattgggaaagtggtacttggttttatatagataagagaaacaaacatttgactgattaaaaatattttaccatgaaatttgcgatacatttttttctcttgctgtgtctgattttgtgcggaagttgttcaaacaaacagaagaaattccaaccggaagcgaccaacgaccatgaggttgcaattattggtagtgcggatggtcctacagaaattgttattggtgaggatagttacaaacaagatagagatacagtgatttatgaaattccccaatgtaggctttggtacacaaagggactatccgaagcggataaaggaaaagaaatccgtatgtggacggagcgcaaggaatattggaaagacgtacaagtgataaatgtgtttgtagcaaatccgacagacgctccaatcaacttcggacgacattggaatatttatatttggaatggggaaaaatgggtttgcccggagttaaaagtctcttatattgcatgggaagatgatttatttgtacaacatcggggaatgttgttgtattgttttcgctttcccgttggagagtattatcatttgcccaaaggcaaatatcgtttgaccaagacattcaaaacaaatgacaaggaaataacacttacagcaaattttaatattcatgatgctgatattatacaggtcaagccacttggaaaaaacggaggtggaagagtggaatcaaagtaaattttattatgatgcgtgatggaacaaaaaataaaacagttgaagcaaatcatcccctacttaatgtttttggggttgttattttatttgtctccaatgttaatcagtgacacaggttccgccatgtttttcttattaggcgtgtttcctgctatgtgcttcggatgttcgtttgtctgtggtctcaaacacatatccttttggtatatattgtctgtacctattctatttattccatcaggacttatcttttaccaatggtcgtttgatgtaggaatattctatgcgttaggatatacgttgattgcattaatcgggcaaatagtggggattggcatttctttatatagcaaacgtaacaaataattgtaaagatgaaaaaaggaatattattattatcaatgttgatgctggtaacactttcgttgcaagcacagacaagcgaacactacattgaagtgacaggtacatcggaaatagaaatcatgccggacaaaattcactacatcattgaaattcgtgaatactttaaagaggaatttgaagagtgggcgaagccggaggaatatcgcacgaaagtgccattgagccaaatagaaaaggatttgaggaaggtgctgaaagaggtgggtgtgttagatagtaccgtccgtacacaagagattggcgattattggcgaaagcaaggacaggattttttaatatccaaacaatttgatattacattgactgatttcaaacagatagatgaaataatcaagcacatagatacgaaaggcattaatacgatgcgcatcggtgaattggaaaataaagatatgttggcatatcaccaaaaaggaaaaacagaagcactaaaagctgcacagcgaaaagctacttatttggttgaagccttgggtaaaagattaggcaatgtcatacgcattgtggaaaaagatagcggtaatgcttttccgcttgcgcaaagcaatgtcctatcatccgatgttgcctcattcgacaatttccgcaccatcaagaagaactattccatgctggtgcgttttgaaattgttgattagtaaactaagaacaaaattacatatcaaaaacggacactgtccagaattttgtgtaaatgaaaacaggattcagttgtaagtttgttcttatatctggattctgttttcaaacataagcataaattgattcataatcaagccccagtttgaaataggcattgtccatttcttttcaatctccataagcgaaagatatacggtcttttttacagcatcgtccgaaggaaatgaaagctttgatttcgtgtactttctgatttttccattcaggttctcaatgagattggttgtgtagattatttttctgatttccagcgggaattggaagaaaacagtcaaatcatcccagttgtttctccatgaaagtatagcataaggatactttcctccccatttcttttccagattgtcaagttctgtggctgcaacctctttgttgggtgcattatagatattcttcatatccgctgtaaactctttcttatccttataaacgacatatttacaggaatttctgatctgatgtaccacacagatttgagtggatgactgagggaatacactgcggatagtatccgtaaatccattcagattgtcggtacaggtaatcagtatatcctgcactccacgggcttttaagtcggtcaggacgcccatccagaaagaagagctttccgatttgccaacccacatgccaagaacttccttcaggccgttctgtttcagtccgacgcaaaggtaaacggtcttgtttatgatcttgccgttatcccgtaccttgaagacaataccgtccatccagactatcaggtaaacaggatcaaggggacggttctgccactcctgggcagcctgattgactttgttggtaatgatggaaatggccgatgtagagagctctatttcataaatctcacgcatctcttcctctatgtcagaaacgctcattcctttggcgtatagggagataacgagcttttctatagaaagtccacgactttcatgtttgggcactgctatcggctcaaactggccgttacggtcacgtggaatagaaatgacagactctccatgttcggtctggattttcttcggataactgccattccgggagttgccggtattgttccctgtcacagaattcttttcatagcccaaatgggcatccatttcgccttcaagcatcttctccagcacctgggcatgcaactgtttcagaaacttgctcacatccgcttctgtcttgaactggctaaggaactccttgcttaacacctcatcgggcactacttgattcttttctttcataatcttcttcattttgcaaatctataaaataaaaaatacgaaactcaaacttgaatcccgtattttccatttacacaaaatattttatagtgccaaaaaacgaaatagccggagtaagaaggttttcatttcatcactccggctttacttcgtttatggcttacccagcttatcagcttcctttctcaacagctcggcttgctcattgagtagccttgcacgctccaacgcttccgcctgtttcttactgcgatattcaaaatctatcacagaatcggtcagaatttgaatgaaatcattatccctctgccagttgaatttggtttccagtatatcaaggacttctccgtttgcccaaccctgcatcagcaaataacggtatttcatatcattgtcctgtaactgctgcatccgagtagccaaacggatattcaaccatatggaagcggaacagagaaccagcactgccgaaagaataaacaatcccggacgaatccaagaagtaaccttgttgcaaatccgttgatagaacggcaagggggtaacttcctctttatccgtcttgtaggaattcaaggtatcaaccattattttaaaattacgatagatttccaatgatattctcttggtgtcctcgatatgctgctgctgaccttgcatcttgttccgtacatcgtcaagttgactttggatagtctgcaacttctccacaggaacagccgggttactgtgcagtctcgacaatgcctgctcaattgctccaaaccgttcgagagtttcctcccggctggctggcgttacctgcgcttccagcttctctttcagttctgttaccatagagagaagcccctctaaaatcaagttgtcttccatttctttacaatttaagtcgttttttctttttcttcttctttctcaaattcaagttcggctcttcatccaccggggacggtgatgcaaaaaacagaccgagcgaaccgcttataaacggactttctgcgttactccgtgtgggtatttgttcccggatgggtgcgaaagctgtttgccgttgactttcggcaacattcaaacctgtatctccgaaatatctatccagtttggaaaaactgaaactgcggtctatctccgagcctttgaacgtgtattctcctttggaaaaggatatgccctgtatttcatcggtctgtccctttcgtttgaactggatagtgatacccttttccgctaacccgtgctgcaactgctgccagttgcgggatttgccgatttcatttttcacagccgtgtaaatctcgtatttcgacttgtccggctctttcaatcggtgctgtttcacctgctctttccccttggcgaaataaagcccatgtttggctttcagcttcttgcatacctgttcgttacggtacatatcgttcctgtccgaaatagtcttgccgttgttgtcaatacggttgaatacgatatgcacatgcgggtgttcccggtcttgatggcgcacgatgatatactgcgtatcggtgattttcatttcacgcatatactcctgcgcaagctgtaccatctttccgtctgtgtctgtcaatttgggcgcatccactgccgaataacttaatgcaatatgtccgacaggcttcttcaaatcgggattcatcccggtctgcatacagaagctgcggattatatcgccccggctttcagtcagaactccgtccgcatgaagcaaaaccgcctgttccttgccaagcacatagttcacacagcctttaaaaccgcttcccttttttatttttccaatcatccgacaaatggtttatgatttcaataatccggtttttgagcttcaccagttccaccgccaccagtgcgaaacctccggcatttgccctatgcgccagctggttgatattgttggcttcccctgccagtttgcggatggtgtccgcatcctgcctgttcagccggggtatgacctctgccgaaacaaccgcctgccttacatactcactgacacacaacccggcttccccggctcgctttctgatagcgtaatactgcaactcagtcagcttcgtactgacaacccgttgctgcttctctatccgtttctttgccggacgaccgcccggcttgtcctgtatctttttcatgcctttttacttttaaatgatgtcttagaaattgcgaccaacgggagcggtttcctttgcggtgagcaaagcaaggtggtttcggtctaccgaaacataaccttgctctccctatgaaaccgccagccgctggcaatcctgccggattaaatacccctgcccttcttttgtcttggggcggcacgttgtccggttttctgctttatttcctgtacttggctggctgcgtttttctgttcctgcttcctgccgcacaggtaatcgttcaagtccgaataccccctgtaattgtgcgagaagtcacgcacacggtaggagtattccaattcgatagcccgtgtcgccttatatcccgtctcgtcattgtcaagcatacagtggatacgttcatacgggtatagcacgtcaatggcttttggcacgttgacagtcgagttaagaataacatagtcctgcctgtcaaggtcgggcatggtcggacagttcttcatccggagcgtgaggaaagaaagataatccataaagccctcaaataccaaacatttctctctcggctctccctgctgccgtatatgggtaatgtctttcggggcgatacaccctttgaaaaaggagttgcgaacctcgtaacctcctgccatattcgggaaaccgatagcaaagaacggtctgccgttattggtaaaatggagttccttacattctctttttgccagttcgatattgataccccgcccctgcaagtaacggagcaatgccggatgggtcaagtcacggacttccaaatgttggaaactcggctctgtcctatgctggggaaaagaaaaactgaccggatgaacgtttggtgtctgctcttctatcctctttaaaaggtagggaagactgtcggaaaaataaagttcctttgccagagcgatgatgttgccgccttttcctgcgccaaagtcataccaaagattgcggtctgtattcaccttaaaggacgcttcgtgttcctctcttaatggtgatttgtaccataaaccgttaccctgccgcttgacgggcgaataacctaaactatgcagataatctgcgatggatatttgtttcacatcttcgatgttcataatattttctttttggggattaaaaaatagttgaaaagtgcgccagtcctgtttagtccgtcatatatatacccgtaccatactaaacctgcctgctgtcgataccgggaaacagacagtccgttccgcttatatatacacccggactaaaccaaaccaacttttaataatgaaaatcgggattgtagcgatagcccttaccctctttcacaatcatgcgcttgtccacaaggaacttgttaagcgacacaaggacattgcgtccacgctcgtaacctatacttgcgtaaccttgtttcaatgccgctatcacattggaatagccttgtacaacctgcttgccgaaaccgttctccaatgcttcccggtgctgctgttccgtcaactctgtaagcggaaagttcctgtcttgtttgggttgctggaatacataaccgtccatgacttcgggcaaagcgttgtcattgatgcgaaatgcgaacgggtcaaactcccggtcacgtatgtgcatcgcctttacttcacttatattgccgtcctgcgtgcttttcgtgatttgcaggacggtttcagctttgttgttcagctctgtaccgatatgtcctcttgtgttatcatcccccttgttcaaatgcagtacggtatggatatgcagattatacccacttgaccagcgcatcaaaaggttgattaggtcggtcgattcgctcggactgttgatgtcgtacatcaaatcacggattccgtcaatgatgagcaaccccacatcgggcatattctctaacatatagccaattatctgcttacgtttgtcgggggtctgctcccttaacacaatgaaaacaaaatcgtccacatctttatcggtcggcagtccggcaaggcgcaaaatacgttccatgaccttatggcaatggtacttgctctgctcggtatcaacatagagaattttgcgcttgttcggtggcagatatgccgaatacttcaaaacctcgtcattcttcaatgctgccgcaacaatggcggaaatgttgaatgtctttttgctcttggctttgcctgtggatgcactgaaattgcccaacgtgccgatagtagaaccattcacccaaagaatttcgggcggtacttcataagtgtccgtcacctttagacgaatggttttccaaagggctgcaaaatcttctttcgtcatggctgtaccttgtccgatttcctctttcgtcttgttttccatagccattatttctttagaggacggttaaggatatacttctgcgcttcctgctctatctgcgcctgcgtcttcaccgggttctgacgcaaccatgcttccagctcagccttttcaaaataaagcattttgccctgcggcttgtaatggggtatcaagttacccgaagtcagcttgtacaggtaacttttagaaaggttcaagaacctgctcgcttcatcgaagctaagcacgttctttgaaaggaacaacatcttttcgagttcgaaaactcttaactccaagtctttttccatatcgtttgggattttaggtgaaacaatatgaaggtgcgcaccctcgtcttttgtgttaacgggagcaaagttaagaggttgaaaatgaagtctaattgacctttgtttgagcgttcaatctatgctcaacctttttgcagttgtttgatgtatttgtctatgatttcatatcctttcggatagatgttcttcgcctggtctgtcgcactcgacaagtcagtaagtgcaagcggttctccttttatcttcttcaatatcaacttattgtttgctataactgactaccactcataaacgatgtagttataacagctgagttgcatcattaggtaagccaacagacgggtattattaactttcaatacaccgtccaacttacagttgaaaaaatcggtaagtattttagcgctgacagtagtagtaaacatattcgcttcgttcacacattcagtcagaagtttgatttcattggctttcaaagtggatttgaagggattgcttttacccacaatcttggctggagtggtttctacactttcatctttttcttttggcaagacttgttcttgggaggcaatagaatctgtatagtatttgctttcctgttcttgcagaaagtataaatacttggaaagtaccataaggctaacaatgatggaaaaacagggaagtcgttcatcatagcaagacggttcatgcaaatatgcgtccatatcaaaatcagaacagcggaaagcgatgtactttttcctctcattagagtttaagtcctcaaaataaccgctttcccacaaaaaatcgggaacatccatatcctgtacaatatcacgcacgacacggtatttttgctgaatggctactagattttcggtaacacggaaaatttcctgccgcaaataatcctttagctgagcctgtgtcagatattcacgctttaaaaatagtgcatctactttagttttatagccatgcgatacgcaactatctaatatcttctgtatctctctgaaattggtttctatatgattttccataactgtaccttatataattttgttctcagatacaaatataaggtggaaatcgcattttccgagaaaacatcagcaataataagacagaaaagaatgcataagagttaagaaattataaagatgaaaggatgaaaaccacaaaagtacactctattcttgtttttgtcgctcagtacacatttagtacgccttgcagaaagagaaagccctgataatcggttgattatcagggcttattagtacccagacccgggatcgaaccgggatggaagtgaatccattggtgtttgagaccaacgcgtctaccaattccgccatctgggcatttgctttgagtaagtttgtttctcatttgcgttgcaaaggtagacattatttttaaacctgcaaacattttcctcttttttttcattttatatcttcttaggatttatggataaacgaaatcccggaatatttcgttaactttgtaagagtataactaaaaaacaacctggatcatcatgaaagataattattgcgttatcatgggcggtgggatcggaagccgtttctggcctttcagcagagaaagttaccctaaacagtttcttgactttttcggtacaggccggtcgctactacagatgacattcgatcgtttctccaagattattccgatcgaaaatatctatattgtaacaaatgagcaatacgcttcacttgtaaaagagcaactgccagagttgggaaaatcgcagatattattggaaccggcacgtcgtaatacagctccttgcatcgcttatgcggcatatcatatcaaagcttgcaacccgaatgcaaatattgttgtcgcaccttccgatcatctgattctgaaagaggacattttcctgaaagatgtgcagaaaagcctcgacttcgtaaaagacaacaatgcactagttacgttaggcattaaaccgagccgtcctgaaacaggctacggatatatccaaagcagcgatatcatgctgggcgaattcacgaaagtgaaaacttttactgaaaagccggatttggaactggcaaaagtattcatggagagcggcgagtttttctggaattccggtcttttcgtctggaacgtcaacaccattttagaagcattctccaaatttctccccgatatctccctccgtttcgatttgggcaaagaaaaattcaacacagcggaagaacgagatttcatcgccgagaactttccttactgcctgaatatctccatcgactacgggatcatggaaaaagcggacaacgtatatatgctctgtgttgacttcggctgggccgacctcgggacatggggatcgctgtttgacctggcgaagaaagacgaacaaaacaatgcgctcctaaaaagtgaagcgataatgtacgaaagcaacggcaatatcgttgccctcgacaatccgaaacgcctcaccgtcatacagggcatcaatgattgcatcgtggccgaatccggcaatgttctcttgatctgcaagaaagaggacgaacaacgcatcaaacaattcgttgccgatgcacagatgaaatatggcaaagagtttaattaactgataatcgccaattaatcaggcatctgataatgatcaaaaaaatgacaattgacaatcaaaggcctgccttttagttgtcaattgtcattttttatttctttccacctgtaaaaagccaaatttgcgattatatgtgtttaaaccaaaagtgtcgaagtccgaaacaatgacagcttatgctcacagataaatatccaactcgaaaaggagataaaatttacctatttgaaaaaagttgcataaacttgtaaaggaagtgattgaaaaacgaataaatatatggcaattaaatacaatatggaattttacacccacatcacaatccccaaaaccccatttacattttcctatacggtgcaaacggttctgcttggttcctgctttgccgagaatataggaaaaaaattggagggaaacaagttcaagaccgatttgaacccattcggtacgctttataatccttcgtccatagccgaagcgattcgcatgttacttcagccggaacagttcacaggagatgatctttttcagcatgaagggatttatcatagcttcagccatcacagccgtttttcctcacctttggaaacggaatgcttagccaacatcaataggcgactgttcagttccgctgacacgatactgaaagcccaacggatgatccttactttcggcacggcatgggtctacaagctgaaaagttcgggaaaggtcgtatccaattgccataggctgccagaaaagatgttcgaccgacagttacttaccgtaggagaaatcgtagcggaatggaaaagtctgcttctatcgctttggaaacagaatccagagctgaagatacttttcaccgtcagtccgatccgccattggaaagacggagcacacggcaaccagctcagcaaagccaccctcctgctagccatcgacgctctgcaaaaggaattcccggaacacaccgcctatttccctgcttacgaaatcatgatggacgaattgagggagtaccgtttctatgccgacgatatgctgcatccatccaccacggcgatcgaatatatctgggaacggttcacaggcagcatgctttcacctgattcgctgtcaattcttaaagaatggaaggatatccaaaaggccattaaccacaagccgtttcaaccggaaagcgaagcctataaacgattcatctcgcaaactttgttaaagatggaacgacttaacgagaaattcccttactttgatatgacaaatgaagtcgaaatgattaaaaagaagttctaaacctaattatagagaaaagaatggaatattcaattaaagaaatcgccgggataattggagctgacgccaaaaaattacatgatgctcctgtcagtatattgcttaccgacagccgccgtctttcattccccgaacaaagtctattctttgccctccagacaaagaccaacgacggacataattatatacaaggattatataaattacgtgtacgcaacttcgtagtcagcacttttttaccggagttcgaatcgatgcctaaagcaaacttccttgttgtcaaggatacactgaaagcactccagaagttagcggcccatcaccggaaacgtttcaatattccggtaatcggcattacgggaagcaacgggaaaacgattgtaaaagagtttctttatcaattattgcacaacgagttcaacatcgtccgctccccccggagctacaactcgcaattgggggttccgctgtcggtatggcagatgagcgacaaaaatacattaggcatcttcgaagcaggcatttcccagccggacgaaatggaacgccttcaaccgatcatcgcaccaaccatcggcgtaatcacaaacataggggaagcacatcaggagaactttatctcttccacgcagaaatgtctagaaaagctgacgttgttcaacgactgcgaagcaatcatctatgacggcgacgatgcttttatcgccaactgcatcgagtcggcctgcctgtcccataaagcaatcacttggagtcggacagactcggaagcccctttgtatatcgaatcgatcaagaaactggattccgaaaccattatccgctgcacgcttttaggtttcgaccggacatacacgattccttttacggacgatgcttctatcgaaaacgtcatccactgtatggccgtgatgttgtatctgaaaccgacaagcgtaaacgatatcgaaaaattcaagcgcctcgaaccggttgccatgcgcttggacgtaaagcagggtatcaacaactgcctattgataaacgacacctacaattcggatatcaattctttggatatcgccctcgacttccaacagagccgccgcgtagagaagaatttaaaatgcacactaatcctttcagacatcctgcaatcgggaacgttgccgaagtctctttataagaaagttgcggacttggtgcgcagaaagaagatcgaacgcattatcggtatcggccgtgacttgaaagagtacggaggtgctttcgatatcgaaaaagaattttacctgacaacggatgaattcatcaagtctccgtctttcaaaaagttcaaagacgaattgatcctgataaaaggctcccgccaatttcatttcgaacgtatatccgagctgctggaaaagaaagtgcatgagacgatcttggaagtgaacctggatgccgttgtccataacttcaactattaccgctcaaagctgaagccagaaactaaaatggtctgcatggtcaaggctttcggatacggagccggttcctatgaactggcaaagacactgcaagaacatcgttgcgactacctggctgttgccgttgccgacgaaggaaaagaactgcgcaaggagggcatctcgatcccgcttatcgtcatgaatccggaattcagcagcttcaatgtcttgtttgaaaaccagctggagccggaagtgtacagtttccgtctgctcgacgcaatgataaaagagacggaacgcaggggcatcacctcttatccgatccatatcaagatcgacacgggaatgcaccgtttaggcttccagccggaagatgtaccagaggtttgccgtcgcctgaaagaacagagcggcgtagtagctcgctccgtattctcgcatctcgtaggcagcgactcctatatcttcgacgatttcacaaaaaagcaactggatacgttcacccgcgtggcagcagaactggaagccgggttggaatacaaggtgatcaagcatatcctgaactcggccggaatagaacggttcaccgattatcagatggatatggtacgtctcggcatcggcctgtatggagtcagtgcctccggtcagaaagggctgcgtaacatcagcacgctgaagacgactatcttgcagatacaaaacgttccggcaggcgattccatcggctacagccggatgagctatgtaaagcgcgattcccgcatcgcgattatcccgatcggttatgccgacggcttggaccgtcatttcagcaatggtggtggcgaggtcgtgattaatggccaccgttgcccgatcattggcaatatctgtatggatgcctgcatgatcgatgtcactgataccgacgcacacgaaggtgactccgtcatcattttcggcgaagaactccctgtcagcgaactttcggacaaactaaagaccatcccatacgagatacttacctctatctcgccgagggtaaaaagagtatactacagggaataaatatccgggggccctatcctgccccagacttgaaggggtttcatgtaagcgattgcgtatcttgcacatttttactatctttgtgccgtaacatattaaaataaaaggtatgagtcataatttattgaaaggcaagcgaggcattatattcggtgcgctgaatgacatgtccatcgcctggaaggtggctgaaaaagccgtagaagaaggagcaacgatcacactgagcaatacacctatcgccgttcgtatgggacaggtggatgctctggctgagaagttgcacgccgaagttattccggcggatgctacgagcgtggaagatttggaaacagttttctctaaatcagtagaaatattagggggtaagatagatttcgttttacattccatcggcatgagcccgaacgtgcgcaagaagcgtacttacgatgatttggactacagcatgttggaaaagacactggatatctccgcaatctcttttcacaagatgttgcaggttgccaaaaagcaggatgccattgccgaatacggttcagtgatcgccctctcatatgtggcagcacaacgtacattcttcggatataacgacatggcagatgccaagagcctactggaatccattgcccgcagtttcggctacatctatggccgtgaaaagaacgtgcgtatcaataccatttcccagtcaccgacattgactacagccggtagtggcgtgaaaggcatggatcatttgatggatttcgccgaaaaaatgagcccgctgggcaatgccacagccgacgaatgtgcagactattgcgttatgatgttctccgacctcacccgcaaagtcacaatgcagaacctctaccacgacggtggcttctcaagcatgggtatgagccttcgtgccatgaaccagtacagcaaaggtctggaagaatataccgacgaaaacggacacatcatttacggttaagacgtaaatcaggtgaaagcggaaaggtgaaagtggaaagtttacttcgtgttttctcaaactttcagctttcaactttcaattttcaactcataacgctatgctcgtaaaaatataccccgaaaaccccaatctcagggagatagacaaggtggtcaatatcatgcgcgacggtggcctcgtgatttacccgaccgacaccgtttatgccatcggttgtgacgcgttgaatgtgcgtgcagtcgaaaagatctgccagctgaaaggcgtcaacccgcagaaaagtaacctgtccattatctgttatgatctttccaatctgagcgaatacgccaaagtgagcaacgctgctttcaagttgatgaagaaaaacctaccgggcgcctttaccttcatcttgccgaccagcagtgagctaccaaaaatctacaagaacagaaaagaggtagggatccgcgtgccggacaataatatcatccgtacacttgtacgggaactcggaaatccgattttgaccatgtctttgcatgacaaagacgagatcatcgaatacagtaccgaccccgaactgatcgaggagaagtatgaaaacctagtggacatcgtcatcgacggcggttacggaggtacggaagcctcgaccgtcatcaactgcacaacagactactttgaaatcatccgccaaggaaaaggagaattaatctattaagcaaacaagacaagatgaactggaatcaattactctccggcaaacgtttcggaatggaagaatatcacgaacgcaaacatgaacgcaccgattttcagcgagactacgaccgcctgatcttttcctcccctttccgccgtttacagaacaagactcaggtattccccctaccgggcagtatattcgtgcacaaccgtttgacacatagcttagaggtctcctgtgtaggacgctcattaggcaacaatgtcgccaaaggcctgatgctgaaatatcccgacggaagcgtcaatttcccggaaataggttccatcgtctcagccgcctgtcttgcccacgacatgggcaacccgccattcggacattcaggagaacgggcgatctccgcttactttgctgaaggtaacggaaaaaagttacaggaaaagattctcaacgaaggagggcgctatgaagactttcttcatttcgaagggaatgcgaacgccatgcgtctgctcacccaccagttcatcgggcgccgcaaagggggctttgccctgacatacagcacgcttgcctccatcatcaaatatccgtattcttccgtttacgcagggaagaaaggaaaattcggtttcttccagtcggaagaggaggcttacctgcgcattgccaacgaattaggcattagccggaacccggaagacgcaaataggttcgtccgctatccgcttgtttatttggtggaagcagctgacgacatctgctaccagatcatggatatcgaggatgcctacaaactgcatatcctaacaacggaagaagccatccggttgctcctcaattttttcgaaggggaacgcctcgaccatattgtccgtgtcatgaagatggtagacgataccaacgagcagatcgcctacttacgttcctgtatcatcggcctcttggttgacgaatgttcccgcatcttcctcgaaaacgaagaggacatcctcagcggaacatacaacactccgcttatcaataacatttgcgatcaggcaaaagccgcatacgacacctgctcaaaaaccgcttacaaaaagatataccgcgctaaagaagttttagacattgaactagcaggttaccatatcttcagtcatttgatcgacacgctaacagaagctgtcatgaaccaaaatcatgcctacagcaaacttctgttgcaacgcatcccagaacagtatgacacggatgcaccaactgtctacggtaaagtacaatgcgtcctcgattatatctccggcatgacagatgtatatgcattggatttataccgcaagatcacagggatgagcttgccggcagtctaatattcttccctgtacttgctctcctgcttatcatccagaatgctcaggtagcttttatatcgcgattcgctgatgcaatgttcttctacggcacgcaacacggcacagcccggctcgtggcgatgagagcagttgttgaatctgcaatcggcagagaatttgaatatttccgggaagtaatgtgcgatttccgcaccttccatttcgatcgtaccaaaacctttgatacccggagtgtcaatcaggtaaccaccatccaacaaaggaatcatctcagaaaaggtggtagtatgcattcccttgttatggtattcggagatatcgccggtacggagattgacacctgggatcagtttattgataatagttgatttccccacacctgaatgacccgacaataaagtgattctccctttaagatcttctttcaacacatccaagccctcttcggtacgggcacaaagcatagagcaaggatagccgatcgtcgtatacagattgaccaaatcgtccaacaattcccggtcaccgccatgatagcgatctattttgttgaagactaacttcaccggcacacgataggcctcggctgtagcaagaaaacggtcgataaaaacggtagtggtaatcggatagttgactgtcacgatcaacatcgcctggtctacattcgcggcgataatatgcgactgcttggaaagattggaagcgcggcggatgatgtaattcttccggtcttcgatcttggtgatgaaggcggtcccttcggcattgatatcgatatcgacccggtctccgaccgcaacaggattggtggtacggatttctttcaggcggaaattccctttgatcttactttctatatcgcgaccatcatcggttcgtacagtataccagctacccgtattcttaataaccaatcccctcatgttaattgaaagttgaaagttgaaagttgaaaattgaaagaaaggatctattccgtcactttcaactctcaactttcaactcgttatactgtcattatttctttttcttttgcagcgtagagttcatctactttcttgatatacttgtcatggaccttctgaacttctgcttccgcatctttctcgacatcctcaggagttccgtcagtcttaatgctcttcttcaattgctcgatcgcatcacggcgagcgttacgaatactgattttagcagtttccgcttcctgcttagactgtttagccaacagacgacgacgttcttccgtcagaggaggaatacccaaacgaatcacttcaccattgttttcaggagtgataccgacttcagaatccataattcctttttcaatatcctttataatcttcttctcccaaggagtgatcatgatcgttcttgcatccggaacagttacggtagctacatttgtcaaagggacaggagcaccgtaatacatgactctcacacaatccaaaattttcggattcgcctttccggcacggatatgagacaactgttcgtccaaatattcaattgcgaaagtcatcttctcttctgccgcctttacatactgctttatatctgccataagtgattgtatatttttgttttctttgttattaggcaaacaaaaatagtaaaatttttctttttggcaaactgtttatagaaatatgttattcccgaactgccgggactacctcaacttcgtaaaaaggaagagcagataaaacactccaactaccaagaccaacaaggcacctgtctgcgaatgaagggcatcagaagcaaagcccatcaagagcggaaaaaccgttccaccgaaaagtcccataatcatcaagccggatacttcgttttgccgttgaggcatcgacaacaaagcctgggagaaaaggatagagaagacgtttgaattgccatatccgaccaaagcaatgctgacgtatagcaggaccttactgtcaaacaaaaggaaacctgccatcgaagcaaccatcagtacgacactgacgacaaaaaacttcttcgccgcccaatgagctaagaccaacgaaccggtcaggcaaccgatcgtacgaaaaatgaaatagaggctcgttgcaaatgccgccacatgtatatccacccccaacctttccatcaggatctttggggcggtagtattcgtaccaacatctatgccgacatggcacatgatacctacaaacatcaacaagataaacgggttacccaacaaggctatgcattcggcaaatgtggacggtctaccttccggcgcctcttccttaatagaagccgcccccaacagtaaaattgccacaatcgctattgccatatagaccgggaacagtacacgccagcccaatcccagcgaagggatcgccgccgtcgccccccacatggcgatataaggtgccagaaaagaagcgatcgccttgacaaactgcccgaaagtcaaactactcgccaacttatcttcagtaataatattagagagaagcgggttcagagaggtctgcatcaaagcattcccgatccctaataaagaaaaagagaccaacatcaccatatagccatcgccgaaacatgggatcagcaacgacacgaaggtaacgactaggctcagcatgaccgtctttttccgcccgatcttattcatcaacattcccgtcgggacagaaaagatcagaaaccagaagaacactaaagaaggaaagatattcgcttcggaatccgtcaatcctaaatccaacttcacatagttggaggcaattcctaccaaatccacaaatcccatcgtgaagaaaactaacatcactgggatcagccttatatacaagcttttctctttcataatcagtctttatataggataagcaggccatgcaccctctttcgtacaaacaaaagctgctgtcccgacagctgtttgatgggcttcgcgcaaggatttaccggctaatatagaataaacgaatgctccagagaaagaatctcccgccccgaccgtatcagccacctcgactttgggagtaagaatcgtcgacttgtcggcagccgtatagacagaactgtagcgactgccggcagtcaaaatcatatagcgcaggctgtaacgctcaaccaattggcggcaagctgtatcttcatcctccgaaagggagaacatttcacgtatcaggtcgagttcctcgtcattgatcttaaatacattcgcctcttccagcagactggcgatcaactccttcgagtagtaagactggcggatattgacatcgaaaaaccgaagcgcctctttacgggcataggaaagtaacgcatgaatcgtcgcacacgattcgggcgaacgctgcgccaacgtaccgaagcagatggcatccgcttctttcaccagatcgatggcttcctgagtcaaaggtatatgatcccaggcaacaccttctataatcgtataggtcgggataccgtctttcaactccaccatcacgcttccggtaggatattcgactgtccccagcaaatggcagataccgttcttatccaactcctggacgatctccgtcccaaacacgtcattcccgaccgcgctaatcgcatacccttcggcccccaattgggtagcatggtatacaaaattgatcggagcgcctccggcacgcttccccgttggcaacacatcccaaaggagttcgcctataccgacaacaacaggtttactatctttcattaatttacttattttatattttctaaattactcccagatggatcggaacgtgtatatttccatttcttttacttcgatattatttccaaaaaaatgaaatccttccctgtttttcaagtccggccgacgctccatcgaataagaataagccccatcatcaatataaacttcaatagaagttttatccaagataatatcggccgtgatttccatgcttgtcatgtcctcgggcgaataaaacacaccattgatccgattgtaattcatatcgtaatccagtaatgactgcccgaacaggttcaggccggcattcgtggcatgagacaatttgagggttgtacggatacgcaatgtacttgcatccttatactgccgaagcagttcatcagctttatctgccgtcagcgctctccactttccgactgatgtctgcaagcggtcaagttcgtcgatcggtttactaaacaggcgaatgccgtctttcgtcgttctcaaagacaactccgtcgggaataacatcatcccattaaaaggcattcccggatgagagatacgcccccaaccgatctgaatacgacggccatccgactcaggtatattcgtaaacgtctgggcagcatagatagaaccggtcgaatagtaatatttgccggattcaggtgtaaatttctttccgtcaaacacacccaacatataagtcccggaagcaccatacatcacccatttagtattgtccttattcccatcgacagggagttcgaacaattcagggcactcccaaaaaccggtaatatggctttcgaacgtccagtctttcaagttgtcagagttgtatatggaatgtccatcgcgctcattcagcaccatgacccatttacctgatggtttatgccaaaagactttcggatcgcgagtatccttactgttccatttggccttagaatcgatcaccggattgcccttatattttgtccaagtgcgtcctttatccaggctataggctatacattgcacctgcttttccgggttgtcagctgtataaatagccaccatcgccggaataccattctttccgaagccggaagtattgtcatagtcgaccactgccgaaccggaaaacaccgtaccgtgttcgtcgggatacagggcgatcggtagctcttcccaatgtatcaaatcattgcttactgcatgcccccaatgcatattcccccagtcgcgttcatacggattatgttggtagaacaagtgatattcaccgtcataatacagcaatccattaggatcattgttccatcctctacgttgagtatagtggatttgcggacggttggtttctttatacaagctatcttgtccggttatttcatctgcttgataaatcttgtttatacctgttttattcccagtataagatatttttatctctttgttcttcaaggcggacatatcgcaaaacacccaatagtccggttttcccgaggccaaacgaatctcaaacacccgctcttgccgccctcccacatcaaatgtcatcagagcccggtctacctgatgcgaaaccggcagattgaggtatctcttcgttattttcattgtcaggtcttgcgcactcaaggtgaagatacaacccaccagggcactcgcaagcacccctatacgtttgttattcatttcagcattaattatgcaccagcgttccgatgttttcaccgctcatcacctttttcagattaccgttggtgtccatgtcgaagacgatgatcggaagattgttttccttacacatcgtggtggctgtcaggtccatcaccttgaggccgcgcgtatagatttcgtcgtaggtgatgtccgagaacttggtagcagtcggatccttttccggatcggcagtatagataccatctacacgggttcctttcagcatcacatccgcttcgatctcgataccacgcagggaagaacctgtgtcagtcgtaaaaaacggattgccagtaccgcccgacataatcacaacatggccctgttcaagcaattcgatcgcacgccatttgttataaaactcgccgatcggttccatacggatagcagtcagcactttggctttcacgccctgagcgacgagggcagaactcaaggccaaactgttgatgaccgttgccagcatccccatctggtcgcctttcacacggtcgaagcctttggaagccccgctcaggccgcgaaagatgttgccgccaccaatcacaattccaatctggacacccatttcggcaatttccttgatctgcgtcgcatattcgttcagacgaacttcgtctataccatattgtttacctcccataagcgattctccgcttaatttcaacaggatacgtttgtactgagccatattgtcttgatttatttgattgttatacccacaaaaatacagtatttcaatgacccagcaatagcagtcctttatttttattttagtaaaacattttaacgagactgtacacccactgtaacaattttgtaacatcccccttctacctttgtctgtaaaaaagagaaacacacacttatattacttattttgaagacgcgaagaaatcaccaagaccttattcctaacttttatacggcaatcctctttcagcggaaagaaacgggttgccgtatattttcccgcaatacctataaatactttaaaaaccgaaacaatacggatttacctcttgttttgagggaacaaaactaaaaaactgttttgattttttcgcctcatgacttgagatgtattttggatcagattcatcgctctgatgaagaagatagcgagctatctgacgaagaagagcgacggatatggccaaaaagacactcaaagcataggtaaaaaaacagcaaaataataaagcaggctgtttgtaaaaaatcaaaacagtttctaaagtagtaatcatttaaaaacgtaatggtatgaaagatttattaatcggtatggtagtcggagttgtcacaggttatgtactccgcaaaatggaagatgatggaaaattccgttgcctccacgcaaacctccaccacctcgcttcaaaggcaaaagaagaagcgatgaacctgaaagacgcaggcttggacaaagtagaatatgttgccgaccgcgttcatcaggttgcagagcaggaaaagagcaaaaaataaaatagtcgaaacaaaatcctgctcactaattcagacatagtttgagaaaggtgtgtcaaatatcggtattcatgggacacaaacaacgaagacgagcgcagatcaacgcagatattattaattatcagcaaaataaacctacgtctatctgtgtattctgcgtcatctgcgtccagtgatatcaaattggcacaccttcctcgaattatcgtgacagacgtgttttactaacgcgcctctccatttttatcagagtttatcctttaaatattttcccgtataagatgcctcgcacatggccacctcctccggcgttccggtgcaaaccagatttcctccggcattcccaccttcggggccgagatctaccagatagtcggcacatttgatcacatccatgttatgttcgataatgacaaccgtatgacctttatcgatcagggcattgaaagcctttagcaacgtcttgatatcatggaaatgcaggccagtcgtcggctcgtcaaagacgaaaagtgtcggttcctgcttctcttgacccaaatagtaagcaagtttcacacgctggttttcaccaccggacaaagtggatgaagtctgtccgagtttgatataccccaacccaacatcctggaggggtttcaactttttgacgatcttcttttcctgtgatcccggatattgtccaaagaactcaatcgcctggttcacggtcatttccagcatatcatagatactcgcaccgtgatattcgacatcgagcacatcctgtttgaagcgcttgccgtggcaggtttcgcattcgagggtgatatcggccatgaactgcatctcgaccgtgatcctgccttctcctttacattcttcacatcgcccgccttccttattaaaggagaaataggcagccgaatagcccatctgcttagccaaaggctgctcaccgtaaagtttacggatctcatcataggccccgatataggtcaccgggttggaacgggaactctttccgatggagttctggtcgacaaactcgatacttttgatcatgtgcatatcgccttccaagccggaacagtcaaccatcaagcgggcagcctcgtccaaataatgcttgacaccttcgtagaaaatatcacgcacgagcgaacttttacccgaaccgctgacgcctgttacgactgtcatcacattcagggggaacttcacatcgatccctttcaaattgtttttacgggcacctttcacctcgatataattattccagggacggcgataaaggggcacttctatctggtcctctcccgtcagataccggacggtatagctgttgctactggttttcaaatcgtccacatcaccctgatagaccacttccccgcccaagcgaccggccttcggaccgatgtcgataatgtaatcggccgcacggataatctcttcgtcatgctccaccacgaccaccgtattacctaatgcctgcaattgccggagcaccttgatcagcaaatcggtgtcacgagaatggagcccgatactcggctcgtccaatatataaagagacccgaccaagctactccccaaagaggtcgccaaattgatacgctggctttctcctccggaaagagaggaagacaggcggtcaagcgtcagataacccaaccccacatccaacaggaattgcaggcggttagtgatctccgtcagcaaacgtttggcaatggatgcctcgttctcgtcaagttgaaggtgatcgaaaaaggcttttgcttccgtgatcggaagggtaaccagttccgcaatatcctttccccctacctttacataaagggcttcgggacgcagacgggaccctttgcaagtcgggcaaacggtctttccacgataacgcgctaacatcacacggtactgtatcttatacaggttctcttccacaaatttaaaaaagtcatcgatgccgtgcagtccgcgggcaccgtgccaaagcaagtccttctccttttgtgtcagatcgtaatagggacggtggatagggaagttgtatttctcgctcttcaagataaactccttcaaccactctcccatcacatcgcctttccagcagactaccgctccctggaagacggacaggcttttatcgggcacgaccagattttcatctatgccaagcaccttcccgaacccttcgcatgtcgggcaggctcccaacgggttgttgaagctgaacatcatatcggtcggctcctcgaacaccattccatctgcctcgaacttcttggaatattcttttacaaccgttccttcgggtgtgtagatacggatgatacaggtatcgtgtccttcgaagaaagccgtttcggcagagtcggcaagacggcttttcaatgtcttgtcatccgatacgaccagacggtctatcaacagttcgatcaccggggaggaaagcaatgcgtcatccgccagcacttcaccgatgcggtaaacggtctcgccaatggataaacgggtgtacccttctttttgcaggatttccaattgttctttgataccgcgcccatccggcaggacgacaggggcatatacggcaaagcgagtcccggcaggataacccaagacttctttcacgatatcgcttacctggtgtttcttcacttccgtccccgacacgggagagatggttttcccgatacgggcatacaggaggcgaaggtattcgtatatctccgtagaggttcccaccgtcgaacgcgggttgcgggtgttcaccctttgttcgatggcgatagcagggggaatgcctttgatataatcacactccggcttgctcatacgccccaggaactggcgggcataggcggaaaggctctccacatagcggcgctgcccttccgcatacaacgtatcgaatgccaatgatgattttccactaccggaaaggccggttataacgacaagtttgtctctgggaatctcgacatcgatatttttcaggttattgattcgagctcccttgatgaatatagaattgttttcggacataattatttccttcattaatcggttccgaggaagatagttttgacacaccttcccgaatcgcaaaagtaaaaaaggattgccgttttgccaagtaaacggctgacattcacattcggaaacaatcaattcacactttctatataaacggggccgaccaggccggatttctgcaacgtatcggttggtttccagctattgcaaggtgtccaggttttccgttcggactccggcaaaccactgtcgccgatcaaacggttcatccatgtggtaacgacctctatctcaactttattctttcctttacgaaccaaattcgtgacatttacccggtagggagccgtccagacaccaccggcatactgaccgttgatcttcacttttgccatcacaccgacatcgttcagattcagatacaattcgccctccggtttctttttcaacttaaattccgtctcgtaccaaatcgtaccggaataatagcggatatcgggattctcgttcttgctgatatcttccaggcaggcaaaggtctggcttgcagggcctcttctcttttcctcaaaagatactttccagggagcatccaggcggacaagcgtctgcggaaccggatagttcagttgcaaccctgtcccctccgcttttgtggccggccgacggaacacgacgaaagcgctctcataaggatacagcttcaatggaacgactgtccccgcagctgtctcctcataggccgggagcgtacgaatacggcctgttgtcgcatcccacaactccggttgctttgaacggacacggaattccggacggagctcgatcgtttcgtctttctggttggagataaaatagatatcggcatctacagcagcacggtgcccgtagagaaccggagcatctgccggcaatccgcaatccggcacacaaccgatatgcttcaaggcctcctccattgtcataccgaacagcaattcgccttttcctcttttgactgccttcacgcttcgcccgtccaaaccggaccataattcgccggccaatttttcaacctgcctgtcggccgtttggtaagattctccactcggcgaacgtttcggagccggacctaagacaactgcgccgtcttcgatcagtttcttgatcttggcaagcagttcgggacgcatggtttcaagcttcggaagtaccagtatccggtattgagtgccgtgaggcaacgtcagcaaaccgtctttgacaaagaggtcgcgctcgatcacctcggcattgatataatcgaactggtaacctttcggcagttcggggtctacgataccggtcatcttgggagcatcttcgccgatgaaataagcgacatcggcaatattcaagccttgttgcaacatatagttgactcgtttcagataggatgtaaacaaatccatctgcggataccaggtgttcagccggttgaattcgctactgaaccaggcgttcatccccggctcgcgttcttccgaaggttgagagatatagacatgcaacaacgtattgttgatcccttccgtaaagaaacggtcgccgcgttgtttcatcatggcgggataacaactgaaaggcgtcccgccactggtgaacgattcggccgaaatcttctgtttcccataaatatgtccgcaggaagaagcggcacggttctcgatattgcccaaatcgccgaagctccagaactcacctcctatctcgtccgattgtccgccatattgcaggaactcaccggggaacccccaatgcccgtagttttccaaccaggtcgtcaaaccatatttatgacacacatcccgtaagccgccgacatagtcgtatgcgatcttatccgcaaccaagcgccgcagatcccaaaggaaacggtcggactggtcttcgctcttgaccacatatccttcataaacaggaaggaacggtaacgggtcatagccgtaacgcgcctggaattccgacaagaagtcgtcggcaaagttctgcccacctgtctcgtaactatcttgtacgactactttccaacaggcacgatcttctgccggaatacgacggtatatttcacccataaaggcctcgaagtgtgctttcacatgtttgcggctcatcttatctatctccagtccggttgcttcggggtcggcaggactgtttgtcacgcctgtcgggagcataccggtgcgcaagatcgtccattctcccgccggagctttccatacaagacggtctccctgcaagaaagcagaaatatccaatactttccccggatcgatcaccagagagggatcgtccgtttccggttgtaccggccactggtattcatgccaataaggaagcggggtctgaaacatcttggccaatgtcttttcgggataacgttccacggcaggaagggaagagaattccacctcgctcagccccataccgggacccacgtttgccaactccaaccggaactcgcttgccgtcgtcgccgggacagagacaacaaccggtgcatacgggtcaaagccgacattcaaatttgcattgaaacggtcgagcttgaactcggacagcatccggtaagccccgttttctttcacccataagcgggcattggcttgaatcggctgacgggcgggaaagatttgcaaactgcgtaaggtaaacggaacgtccgccctgaaatcgatcgccacaggcttttcgctcttttccgtaaaaagcacggctgtctccttatctccgtcaatcaggctgttcaggttttgcaaaggcatagcagatgtcacttttgcatttgccaccgacaaccgggctgctttcttcccgacagagggaaaagcgattacctttacatcctggaagtctttatcgggtttcgccaaaacaacttctacctgttttcctccgctgacttccgccttcaccgatgccagataacgcatcgcctgctcaggtttcacccacggcccgcccgactggctccatccgggagaattaaagataccgatctctattcctaattcagttgccgttttaagggctgcatgcaatatcttccaccattcctcactataaaacggaacggtcttatagggcgtatgaattccttccaacccgatattcccgataaaagcccggttgatcccggcttctttcatcgaatacaggtcctttttcacaccttcttccgagatattcccggagatccaataccaataaacggatgtttgtaccttttcggccggattcataaaaccggactcaagcgcatttctctcttgcccgtttcccgtaaaaggcatcaacaacgaaagacaaagcaatgttttaaacagaggtttcctcatggtctgttctttttaagatttcggcggtaaaagtaacaagattctttccacctctgttttctatattgatttatatcttttcaaaaatgcttttccaaacaaatttccatcaagccttattctcaaaaccactgtttataacgcaaaaaagatagaggcttttaaacttttattatctttgcaggtggattaaataacagacaaaagaatctcaaacttatagacttcatgatggcaaaataccttcgtctgctactggtcttgctgcttggcgcagtaacatcatgtaagacggcacaacaaataccgcagcaatcgactggaaaagatgtgaaacgggaatttcgcggggcttggatacagaccgctttccagggagaatacaaagatatgacacccgtacaaatgcggaaagactttatccgcaagcttaactatctgcaaaaatgcgggatcaatgccatcatcttccaggtacgtccggaagctgacgctttctacaaatcggacatcgaaccttggagccgtttctataccggccagcagggactcgcacctgccggagacttcgacgtaatggctttcttgatcgaagaatgccacaaacggaatatggaattccatgcctggctgaatccttaccgggcaagtacaggcggatacacccgttttgccgattcacatatatataataaacatccggaatggttcgtgacctacaacaaacaaatcttgtttgaccccggattaccggaaagccggcagttcatctgccgtgtggtacgggatatcgtaagccgttatgatgtagacgcaatccacatggacgactatttctatccttatccggtagccggcatgcctttcccggacgacaatagttttcagaaatacggattgaacaaaggatataaagcatcacaacgtgccgactggcgaagggagaatgtgaacaagctgattcgtgagatcaagcgcactatcctgctgtccaaaccgtgggtcagattcggcatcagcccgttcggcatctaccgcaataagaaaagcacgcccgacggttcaggcagcaacaccaacggattacaaaactacgacgacctgtacgcagacgtgacacgctgggtaaaagagggttggatagactacaacattccacagatatattgggagatcggacacccggctgccgattacatcacgctgatccaatggtggaacaaaaacgcgacgcgggaaggcacgcatctgtatatcggccaaaacgtagcacgtaccatgaaagcagaccagctcacccgcaaaatgctttacgaacgttcactctcgaaagtaaaaggcaattgcttttggcctgcaaacgaaatactctggaataacaaaggggtggccgacagcctgaaacagaactaccaccgttatccggcattgatcccggcctacacccatctgcacaaccgggctccgcaagaggtcaagaaactgaaagccgaatggactgcccagggctatatgttgcactggcaggcggaacagagcaagaccaatcccgaattggcaagctatttcgtcatttaccgcttcgaaaacaaggaaccggtcaatctggatgatccttctaagatcgtagcggtcacacgcgagacgaactatctgctaccctacgacgacggaaagcgcaaataccgttatgtagtcacagccgtagatcgtttccataatgaaaatcaaggtaaaagcaaaaaggtaaaactttaaattcagccacggatgtcagattttatctgtcagaaatatacagactgttcttcttgctcccactatcagaaacagatattcaaataccgttctttcccgaaaggaatgatgatcccgaaagaacggtgttcacaaaatacgatctattttctgatatccggctccgttcgggtaaccagcgacgagcatccggatacggtatttcacgacgggcagttcatcatgcagccgatcggttcacgtgtagagttccacatcctggaatccacggaatgcatcctttacctgttcgagactccgcaaaacatttgtaccgaccgtttcaacaaaggactggaactggcgaaagagtctcccatgctccctatcgtcatggatatgtgtttccctttgcgcctttttatcaacgggctcaaaatgtacctcaacaacgaactcctgtgtgtggaattcctgaaagccaagcagacggagttgtatttcctgctcaactgctattatacattgaaagagatcgcctatttttatgcacctatatataggtatagccaaacattccgctactttgtcatgcaaaattacctgaaagcgaaagatgtcgagtcttttgctcaattaggaggatacagcactatcaccttccggcgtttattcaaagatacgttcggagagccagcttaccaatggatgaccaaaaagaaatgcctggatatacaaaacgacctgataaccacgaatgcaagcatatccgagatctgctataagtacggtttcgaatccttgtctaacttttcccatttctgccgggccaacttcggcaaatctccacgcgccatccgcaacgaaagagacgaaaacgtgtagaaatcaatctatttcatacattccaaccttttgattaaaaaagcaattcatccggaatctcccaccctcgcggaacaactaatccgaaacataccctaaactaactcggaagtcatagtaaactaaatcaagacatacagtatattatttatatgtagtactacttatcgcaaattggtagcactacatatcgtctataggtagtactacatataggcaatagatagtgactaccaacagatactttactatatgttatgaattagttcttggggtgttttgatctagttgatggtatgaaacggattaatttaccggtcatcccaggccgatttctcagagtgccgcatatcggaaccgacacctatttaaatatgtaaaatctatatatttataaacagaatcgatactgaatacacattcggacagatttattgcatatctttgtagaataaactatttagtattgggggtatatgaaatttaatcttatcactctgtttatcatcctttgcctaggattcacaagctgctccgagaacgagactccggaaccccggacaacccgcaccatattagtctatatgatggccaataacagcctcaacagcttcgcctcgaaaaacatagaaagcatgatagaaggggcgaccagcaaaaatctcaacggaggaaacctgatcgtttattatgctcccgccggttcgcccccggaacttctccggataaaagaagaaaacggtgttgtcaagaaaatccatctgaaggactatgaaaagcagaattcggctgatccggacgtgatgcggagcgtgatcagcgaagtggtttcacaatatccggcagacagttacgggttggtgttatggagtcatgggacagcttggcttccttccgactaccagaataagctgaaagcgttcggacaggacggcaacaactggatggagatcgacgatctggcaaagggactgccagatgatctatttgattttatcctgttcgatgcctgctacatggcaagcgtcgaatgcacttatgagcttagaaacaaagctgaatatatcttagcttctcccaccgaaacaatggcggacggatggccttatgaagagatgatgccgcaactgttcgctactgacctgcaactggaaaaggttggtgaaacattctacaaccattacctgaacaatacctatccgtatgcgaccgtatcgctcacgaaaacaagcgaactggataatctgaaaagcgtaacacatgatatcttggcagataagaccgaaagcgatatttacagtctcgatccaaagaacatgcaaagactggaatatttataccgtagcccaggaatgctttatgacttcaatgattatatcaagcagttggcgacagccgaacaatacgatcgtttcatcagttgcctggataaagcagtcgtctacaaggcccatacgcccaaatcctactacgccgccataggaaatgcgttgccgatcaaaagctattgcggcctgaccattttcgttccgcaagaatctctacccaaaatgctcgaatggtataaacaaagagtcggctggtataaggcagtttatgaataaatcctctatcaccggatcaagaaagcctttttaaagcgtttcaccgtaccttcggggtggtatatttcagcataaaagatatagacacctgtttgtagcggacttccgttgttggctacgccactccatgtgatcttaccggagatgcctaacaactcatgattggatatatcagctacacgcagaccggaggtattgaaaacgaaagcgcgacagctatatcccggacggtcgagcaggtaggacaccgtgtaactaccggactcttctatccacacaggaggttctatacccgtggcatcgcccgatgaagcgtctttgtattgggagttctgatagccaggtgtgccatagccaactgtttcggaagcggaggtccagtttgccgcgtcttgcgtagcggcatccggatcgatacgttcaagggcaacaccttttttatttttgactgaatgagcatgccatttagacgaataggcgacttcatctattattatttcatccgctgtacgaaacaacactaaggtagaagatgtattggcaagaataggaagctttgccaatccgcaaagagcagacggatcggctatatcataaaaagaagtcacaccttccaagttcttggttaagaggaggtaactctttgcctccagattatgcaggacggaagtcaatggatagcgagtgctaagtgttccgtccgatttacggatggcgacagaaagggcggacaaagacaaggaatgctccgaacgattatacaattcgatatattcgctgcctccgacatatgggtcgaggagcaactcgttaatgatgatttctccgggttggatcggttctgtgacgcccggaatgttgggatcatccggattatccgggacatcgggtcggtctggatctaccggcggatcttcctccttatcgggagaagaattaacggcaccgggagttccaccacgtggatcagtagaaagatgccagcctgaagtgcctcgttcccacgacactccggaggtagccgcttcatacgccacttcttctatcttgcccctggcagcatcccacaattgcaatacagctcctttgtcattcaaagccggaaacttctcgataggaatcagcaacgtttggacagggaaggacaacgcatcctcctggtccagtaaaactgcatatccgccagcaggcaaatccatctctggcagggctttcgtcttcttccccgtcacattcttgtacacccatccgtccaacgagacggtagcagcagtcgtattatgtaattcgatatattccaccattcttccatctcccggctttgccatgacttcattgataacgaccgaacctgctggatagctctccggttcatccggatcaggcttcagttccggcttatccgtcccaggttcttcttcccctctcaacacgacttcgacagcttcatccggcatcgcctttcccgacaaagagcgaagaccggcataagagatcgtgtatgaatggtccaactgcatctcttgatcgaaaaaagtgcttacgaattgcttcgtccctgcatctacatactttttgaggtaagcgtctccaatatccgaaatactgaagacagccttatcaatatcaaccggcttatcaaaagcgaacagcaagttggaggccgatagcggctcgatctcaagcaactttggcggactttctgattctcccggttcttcttcaggcttgtccggctcgatcggtgtctccgtcacccgattaagcacacacacattatctatgctgaaaagagaacttcgtgtcttcgtgtaataaaacgtaaataccaagttgcctctctcaaccggctcttcgatcgtgtacatggctgaaccttcaaggcggtatccctccatatcgtctgtcttgtaatacaaactccaccggagattgtcttcaagcgtcactttcacatgtaacaacaatggcgactcttcaaaatcggtctgtggcagaatcaaattcccgtttccgttacgcttcagtcctaattccttgttgccggtattcccgagacgtacataataataacgttcttgattttcctgatacaaatagatgcataatttgttctcgtcgctcggttggttttgcatataaacatcgaactcccattgcatatcgggcgaataggcgatttctttgcctatggaagcagtacctgactctgtcggtttgatattcaactgaagcctgccatcagcattgactacaaactgccctctgtctttgccgatccagtcggcccccaacatcgggccgtcaaacgtctcattcacctgtgaattcacacaaaaaggaagtaatatgaagagataaagaataaattgtttcatagcattctagttttgtttataatttgcatatctttgcaccccaaaacgttgtaatgaaggaaatgcaaagctttccgtaaacgttgtaaagttatactattttttttataaacaaattaattagtgctcaaaatgaaagtagcaattgttggagtgagtggagcggtaggacaggaattcctgcgcgtactcgacgagagaaacttcccaatggatgagcttgtgctttttggctcatctcgcagtgccggacgtgtttatactttccgtggtaaacaaattaccgtcaaggagcttaagcataacgacgacttcaagggaatcgatgttgcttttgtttcggccggtggcggtacttctatcgaattcgcagaaaccattacgaaatatggtactgtgatgatcgacaattccagcgcattccgcatggacaacgatgtacctttggtagttcccgaagtgaatccggaagatgcactgaatcgtccgcgcggtatcattgccaatccgaactgtaccaccatccagatggtcgttgcattgaaggcaatcgaaggcctgtcgcacatcaagcgtgtacacgtatcgacctaccaggctgccagcggtgcaggcgcaacagcaatggccgaactggtaaaacaatatgaacaactgctgaaaggcgaagaaccgactgtggaaaagttcgcttatcaactggcttacaatgtcatccctcacgtagacgtatttacggataacggctacacgaaggaagagatgaagatgtataatgaaacacgcaagatcatgcactctgacatcgaggtgagcgcaacttgtgtacgtgttccggttatgcgtgcccacagcgaagcgacttgggtagagacagaacgaccggtcagcgtagaagaagctcgtaaggcgttcgctgaagccgaaggtgtcgttctgcaggacgaaccagcgaagaaagactatccgatgccgttgttcatcgctggaaaagacccagtttatgtgggccgtatccgtaaggatatcacgaacccgaacggcttgacattctggacggtgagcgaccagatcaaaaaaggggcagccctgaatgctgtacagattgcagaatatctgttaaaagtaaagaatatcggataaacggtatacgatatttggatataaagagaaggagatgtcaaaactcctttatcaggatcttttaggcacggatttacacggataaatttattttctttccgtgtaatccgtgcctaaattatatcttcatttctttcagtccttcttccagcgtatgcgggcgatagcccaattcgcgttttgctttttcgatggacagtccgctattgcgtggacgtggcgttgcctccttcatctcttccgttgtgaccggacagatcagtgaacgatccagtccgaaataatcggctacacggtatgccatttctgcgatagaaagatattccgcgccacagatatgataaataccggaatcatcggtatgcacaagccgttccactccgtcggcaatatcctctacccaagtcggtgtgcgatattgatcggcgacgacacggatctcttgccctgcttccaagcggttcttgactaattgaaggacattgccatgctgtcccggcaacgctttcccatagacgacaaccacacggacaatagcatagttgcggcaaatactcgctaccgcctgttctccctgatacttggtcacgccatagtaattgagcggagcgggcagatcttcttccgtataaagacggtcacttctcccgtcaaacacaaagtctgtcgacaaatggatcaatcggctcccctgatgctcgcaacaatacgccaagttctctaccgccgacacgttaatggcatacgcctcctcacggtgctgctcgcaataatccgggacggaaagagccgaacaattgacaacgacatcaggacagatatggtcgaacaaggcctccaccgccggatagtcgttgatgtccaaccggacggaagtatggttccctcccggacggatatccggatgaagggaacagccgaatacttcgcaggccccgttctccgaaaggttatccaggattcttctcccgacaaacccattagcacctataaccaatatctttttcatcaaaacatatagatcagaacacccaacacacggtggttcgtcaccgaatgcgtgttttctattttaccattttctgcattcatatctccataccaggcaagagaaggactgtattccactcccagcttccagtggggcagattataagagagttggaggttggtagtaaacacctgatccacctccaatccgacaccataggtcggcccggcaatcgtctttcccgttcctaagttcttcagatagccgacaaagattcccggtttccatttcttgccatagactatattcagccaagtcatggaatgacggtaaggcgtatactcctgttcacctgtacgcggatcgacagaggtaaccgcataaccacccaacatacaggcttgcgtcagattggaagccagcaacgtcttacctgcaatcacccaatcctgagtcatatatttggcatgtgcctcaaaagacaacgaagtgacccgctcgttcactttatacacccggtcgtccaccgtcgtttgctgtcggggtttcaaggacagcacttccatgccgacgccggcaatcaaaccatcaaccttataatcagccgagacgtagacttccgggatgcagctgttcttgatatattcctcgctttttccgttcgggccggcagacaaatactgcaactgccacaacacggctcctgtcagctgcaaccctttgcccgacgtgtaccggtaacggatctgagggctacggttaaacggttggaaaggcgcaccggtcgaaaggttcaacatttgcggagatacatcgccgaacaacggatgccaggtttgtcctaccagtaccgccgattttccccaatctaagttgacataagcatggcgaatacgcaagaccgcccagttgcttccggagccgcgaaaatccgcctctaacttggctgttgtcacggctttcccgatattcggtcccgtcacgtctactcccaaacgggaatagagcagatagaaactcccgtttgccgtggcattcaggtcattaccatcggcatccaaattcttgtctttaggataaaggtggaatagcccatccacaatttcagcattggcacgtgaattataaaacaggtcgccacgcacctgtccataaaatttataagaaaaattctttttctgagcatgaccggccgtaaccatgtataaggccgcgaagagtagcaaatatcttttcatttctgtcttttcaaattgattgcaaaggtaaggaagtttgggattactgcaaaacaggaagagtcttactacaccttaaccttatccgaaaaacaggaaatatcctggtaaaagcacccctgacacccatacaaaaaacggagaggataacattattaatacatccacaccaagcaagtcatagttcctattttaggaaccatagttttattcaaggataatctctgaaaaacgcttggaaaaaggaacagggaaattcttcgaacctttaaaagtaatacatcacaagtcccaatatacgatggttcgtgacactatgcgtatttacggtcttgccgaaggctttgtccgtatcaccataccaagctgtcgtcggcatatattccataccgatttgccaatggggcagattgtaggagaaagcgatattggtagagaaaacctggtctatatccaataccatactcggtggcggaaactaatacgtcggccgttcccaagttcttggtataaccggcaaagaagtgccccttccatttcgtcccgcaggtgaaattaatccaagatgtggaatgccggaaaggccatgcagatgccggccagcagtaatatcagctttttcattcttatagtttgttaccagtttaacagagttgagccacaaagatatatattttcctgtatttcatttgaagaacgaaatattatttgttactttgcttccaagttgtaagccttaaaggccaaatcgattaataatgtaaactacataacaacatcatggaaagtaagaaatttttactgcaggagaaagatattcctacagcctggtacaacatcgtagcagacatggagaataaaccgcttcctccgctcaaccccaaaacaaaggaaccgctcaagcctgaagatctctatcctctatttgccaaaggattggtagaccaggagatgaaccagacggatgcctggatcgaaatcccggaagaagttcgcgacatgtataaaatctggcgtccgactccgttggtccgcgcttacggacttgaaaaagcactcgacacgccggctcacatctacttcaagaacgaaagtgtcagccctgtcggatctcataaactgaattccgctattccgcaggcctatttctgcaaaaaggaaggcgtgaccaatgtcacgaccgaaacaggcgccggacaatggggagcttccatggctatggccgccaaacatttcggattggaactggctgtctatatggtaaaggtcagctacaaccagaaaccctaccgccgttctatcatgcagacgttcggagccgaggtgatcgcctcgcccagtatgagtacacgtgcgggccgcgacattatcaccaagcacccgaattatcagggaagcctgggaacagccatctccgaagcggtcgagttggctatgcagacgcccaattgcaaatatgtattgggtagcgtgctgaaccatgtgatgctccaccagacagttatcggcctggaagctgaaaaacaaatggagatggcgggagaatacccggacgtagttatcgcttgtttcggtggtggttcaaacttctccggtattgcattcccattcctgcgtcataagctgacacaaggaaaaaatatccgtatcctggctgccgaaccggcctcctgcccgaaactgacacgtggacaattccagtacgacttcggtgacgaagccggctacacgccactgcttccgatgttcactttagggcataacttcgccccggccaatatacacgcaggcggtctgcgttatcacggtgcaggttctatcgtcagccaattaaagaaagacggcctgatggatgctgtagatatccagcagcttgagacattcaaagctgccacgttattcgctcagagcgaaggcattataccggcacccgaatcttcccacgctatcgctgccgctattcgcgaagcagagcaggctaaaatcgaaggcaaaccacgtacgatcctgttcaacctgtccggtcacggcttgatcgacatggccgcttacgaccagtatctggcaggcgacctgacaaactacgaagtcacagacgccgatgtagagaagaatctttcggaaatagagaagatcattaaataaaaacaagataaactccgatcattttcgtgagatcacgaaaatgatcggagcaaatgaaaatggcgctaataacagggactcacgtcttttgttattcgcgccattttcggttgtgtctatgaaatattctaaaataggtattatgagaaaatgtcgttataacttgttgccggagcaaccatattctggacatttaagctaaaacttttcttctttttatcccacattccgtatgtggtgttgatttcccctgtttctgcatcgtatgaataagtcgtcagataatagggaacccactcatccttactcttattccagcgatatgccttcttttctgacactttgccgttttcattgtaagaaaattcatatttaacttctttattcaaaagcccattgtcatttaagaaaatgacttttgaaataaccttaccattctcttccttcgtatcatacatgtactctctgggagaggctgcgctcattgcaagattacacaagaacataactgcaagaacaagaatgcttttacttaaaatcgaagtcttcatataattattactttaagattactttcaaattgcggtgcaaatgtaggtactattccataaccaaccaaacttttgcttacatattgtcagcatacacatctaatttaacaatattaagcacttcatccgcctttatatagcctggcatacttacatattgtaagaaaacaatcattcatatccaagacttcacgtttcatcttccttaaattcgagtatatccgccggttggcaatcgagctccttacaaattgcctcaagagtagaaaagcgtatagctttggctttacccgtctttaagatcgaaagatttgccggggtaataccgatacgatcggccaaatcacccaaagtgatctttctttttgccatcatcacatccaaattcactattatagccatatcttactcctctgattattcgtcaattacgacattatgaatttcactacccgcatctccagatgtttgccaagctggaatactcaaactccgattcaagcaataaatacaggcagccgataatattatactaagaacggaaaacccagtaaagggcattcccccattatttcatatacggaacagacattcgggtaataaattataagcaagaccgaaattccattcacaatcatatccgaaagaatacatagactcaaactgccggaacaataaaaaagacatcgcttgtgtcttatttatcatgatcagattcttaaattgtcaactcctgttcctctttcatctgcagaccaattgcaaaaatacggcctaccaataaagcaatcaggcccattatcaatgtcatcggctgaaagtcacaccagaaattatgttcataaccttccaactcgaataatcgggttgcctcccagtaattcgttatcatataagcttgtgtcagtatgaaagagatcagcagattgcgtccgatgcgattcaaacggcgtacattcatccaatcgaatatcacctcgtgattaatcgcattgataagcttatagaattggatgatcgcttttataataaagaacagaccgatcagcataaggaaacttacatatcttgcaattccaacatctttggatttcgcccagaccaatgtcttgatatgtgaagccggataccactcctgatccttctgattgaatagcttatctgaagtggcagccaaagatttcggccataaactaagagtcatcgggcttaatattcccgcactaatgtttgttgttccctgctcgtgcgcttcttcagcctgtgacattccttctttgaaaccgtccacaaatgcattacccatcgaatagatgctcggaaccaaagacaaaccgacaaagaaaaatatcaaaacacagattaaattcaattgctttttcataacctatagcattcttgcttaagaagaagggcgggcaaaccccgccctaccttccattataaaccttttatatcaaacggcatacgggcaataataccggattccgtttcagcccggcggatcgttgagaacagtttgaattgttcttcgcccattacagatttggcgatggagacttttgcttcatccatctgcttctccatgaatttggtaaagaaatctttcgggccatctgctactattacagaataatcagtcaattccgctaaagtcgcagcctctttgatcgcatcatccataccgcccaactggtcgaccaaacctctttccaatgcctgttcgcctgtccatacacgtccttgtccgatcgaatcgatctcagcttttgtcatgccgcggccatctgcgcaacgggtcaggaataaatcatatgtttgttctacaccacgctggatcaacgccttttcatcttcacgcatcggacgactgatgtcccccaaatcagcgaatgtatttgtctttacgatatccgtagttacacctaccttatcaaatgttccggtaaaattacggacgacaccgaatacaccgattgaacctgtcaaagtcgtacgttcggcgacaatcttgtttgcggcacaagagatgtaatagccaccagaagcggcataattgcccattgaaacaacgatcggctttttagctttcagctcaaccacttctttccatatctgttcggagatataagcgctaccgcccggagagttcacacgaaagactacggcttttacatcatcgtcatctttcagcttacgtagcttatttgccatttcttccgaaataacctgttcatcggcgctgaaaggagaagaagaatcttcgtctcggatttcaccttccgcatacaagacagcgatcttattcttgttctctttttcttttactttgatagagacaattttgtccactcctgccgttttcagcttgcccttcacatcctgtccggccatttctttcacacagttttccacctcataccgataacgaagcccgtccgccaatttataatcgacagcattggaagcctggcccattgcaagaccttggttcaggtaacgatccaattcgtcggaagagatattacggcttttctcgatagcggttgtcaagttcccccatacgctgcccaagaaagaagtcaactgttcacgattggcatcgctaaactttttcaggaaaaacggctctacggcactcttataagttccaaccttaaagatataatgttccactccgattttctcagccaacccggtaaaaaacaacccctgtgatgcaagaccaaccaacgagacgctaccttgcggatttaggaaaacagagtcagctacgctacacaggtaataagccccctgcgtataataatcgccgtatgacacgataaacttaccgctatccttaaagtcctccaactcgcggcggatcgcctcaatccctgcaaagcctgtagaaagcgaaccggcttccagataaatacctttaatattatcgtttgcctttgcacggcggatcgctttgatcacatccgacacagccatttgattgctactttctcccatcagttccgaaaaaggattcttcacagcctgatcgaccaagacaccatccaaagacaatttgaacaccgtgttcttatccggtttgtactcggaagagccgtcagcactggcggctactcctatgatgaaaaaaatggaacccattgttacgattcccaaagcaaccaacactcccagcgtggatgcaaataccgttttgaagaattgtttcataatgttttatgtaattgttgttcgtttttcaaataatatttatcgtttttcgatattcaaaagaatatattatttctgactccaccaaatatttttattgtttttcgataaaaatattacgaaacacagaaaatatatattgaaagtaagcgtcaaccttcatcagagaccaagtcagctccggaaggctctatttaagtgacaatcgccatgctactattgtcaaacagcctgctcatagaccttttgcctttagtcgaaagccttttcgcccttggtcaaaagccctttcgacactggtcaaaaaccttttcgactaagggcgaaaagcaaaggagtggtagtaatagttgttaatacctgtgtatttgttgattaattgatattgtaacgtctttgtttttcacttaaatatatagaggtgaaaccgaagaggcatggtcaacctatttcaggacgagacaatcagactcttcctaaatactcatccaccgtataattcaagaattggttgaacggatataaaagtttgaaatcttcaacggccttatccatccaatccggttcgaaaaagaattcatccggtttataggagacgacactgaaatctttgtgacgtaggatttcgtcatatttgaaatcggaaggatagccggcaggcatacgtttcaggacttcaccctccattgtcggatatgtcttcttgaaagccggcttttccatgatggcgacaaaatcttctatattttcataaatgtctttacggagtgctttcagcaaggcaggcggcggacaccaaacacctcccgaaagcaggcagccacccggttcaagatgaatataatagccggcacgctcgctgccccgtccgccacaggaagccatataggctgcaaaatgaatcttatacggagtcttgtccggtgaaaaacgaatatcccggtaaatgcggaacaggcaatctttcgcctccaatccggctatttccggatcgaagagggcgatccggtcaatcagttgttgtacttcgtcaataaaacccttgcgaagggaatcgtaacggcttttattggcctgaaaccattcccggttattgttctgacgcagttccgtcaggaattgtattatttctgcattcatcctttgatatattatttaaaacataaatcccaaattcatataaaactgcaaatgcgaattacggttggacatgccgaacgttgcactcaaaggaccggcaatactgttataggcatatcccaggctgcctccccaaaggcttttcccctccagcagatgaaaaaaatcgttgttatgaatgccatagttgccggtcagcgtgatataattgttccccgcaatacgttgccggagctggaggcgagccaccacgaccgaattatccaggatttccacatgattgatcccggcaaaaggcaattgctgagacaaataacgtccgaacgtctccccaccgatcgcatttaagaacggaaaagccgtatttcccccgatcaggacacgcccgtaaaacgcaggcaacaaactcaaacgtgaactaatgggacaaaccgtcataaacttcaagccgatagccgagaaaggagagctaccgttatatttcacaaagttgtccgtatagagtgaatagtccgcctccaaagaaactcccctatttgggaaataccgccggtccaatgtttcgagatgtgccgatgcgaaataactaaaaaagccctccggtttcacagtatacaattcatcactccctgtgtaaagaaaggaattataattaaaatattcataacgcagtccggccttcaccttaaagctcaaccagttcatatccgaataagcgaattctgcaagatggtgtgtataggtggtgttaaaccgtttatctcccttctcataaatgtccaaattattatagctgaacttatacgacaaattgaaattgcgcagcggagaacgttctatcgagtaatccagcatagcagaagatatcttactccccacacgcccggtaaaagcaaaacgggaatgattccgtttccccttatgataggtggcattcaccaacactccgatgatttcctccgaatcgaaacgtatacctaaattcacagaactttccgatttaggctgcaaggtcaagaccagatcctgctggctctcgccggtcagtttgtagtttacataagcataggcatttgtcccgaccagaatagacatggatttgcgcagttccttcaacgtaatatggctgttctcctttagcgcacagatacgatgcaaccagttcaggtcgcgcggatcggctccatcgaaacgaatatgacggacatagaatgtatcggcaggcaaaacaggacgatgcgccaggcgccgcgactgtatagaaaaggtatcggtatccgaaagaccgatcctacgcttcaaagccatgatttcgttccaacgacggcgagcatcagcttctcccctgtgtaacatcgtatcaagagctgcaggagcaaaactggaagaacggtaaggttccatatccggacgaaacagcaggtcggtccggtcacggttccgctcatatttgtcatggccatgcaaagcgatgatctgcgttgcgatatcaccgggagaatgcaggcggtcgtaactacgcagatcgctcgttgccaaatccacgccgataacgatatccgctcccatagcaagtgcgacatccaccggatagttattgttcaacccgccatcgacaagcaccatactgtccaaccggacaggggtaaacaccgccggaatcgccatactggcacgcatggcaagcggaaggctgcctttgtggaatacatagtctttaccactaaccatatcgaccgccacacaagcaaacgggatcagaaaagaattaaaatcgaccgaatcgtgataaccgatcgtcaggtccgaaaagaggttttgcaagttctggcctttcacaactccatcgatcacccggtctttcttctccaacccgaaaggcaaggaaactatataacgctccgccttctctttttcaggaaagaggagatgactacgtttcactttgtcgctcaacaacatatcccagtcttgcaactctaccattcttttgatctcatccgggctgtaaccgatagcatacaaacctccgacaatcgcccccatactggtcccagccacgatatcgatcggtataccggcttcctccaacactttcaataccccgatatgcgccacaccttttgcaccgccaccgcccaacacgactgcgactttcttgcgttctcccgccatcccaggccaggcaagcaagcatataagcaaaagagacaggtatttcttcatcatcacaatcccttttttagttgttatccacagatatattcttctacgagcagactcttatcaatcgttactacttcataacgaataccttatttatatccaatggcaaagatatattttgttatcacctcacgcaataaaaggattgaaaaaacatagcatgtgccgtctactttccaacaaacaacagctcgaaccagatatattctttcatatcaaaagccttatgccactcttgcggcgacagtttggcattccgtacatcgcaatagctgccgccctgtagtaattttccgtctaccagtatttcgcgcaaagcaccactggtgtaggaagtaagcgggatcgtatctgaagtagaaaaagggcggtcgggataggtttccaataagatacagtgcaggacatcttccagttctatctccttggttatttgtaaagaatcgacattcaatgtaaaacgtgccgtatgtttgtggactggctcgactgccatctgtagacgcaaaaccgtatcttgcataaagcaaggcgtctcgttcaatattttataactcaccttcccgttttgggaatatgccattcgtaactgatacggccggccctggaaagcaccggttatttccacacactggctacttgacggaacatccgtttccacataaccaatacggaccgggaccggttgcttaggcgaacagccggcaaccagcccgatcaatagtactattccaacaaaacgcatcatagcttatttcatataaacgaccatcaataccggattatcatcttctgtcaattttttcaattggggatgttccaggactcccggattcttttctgcttctttcataatatcaccggcctcccagacagagaccagagtgttccggtccaaagaagtcgccggacgcaaaggcaaagcaccggggaagtcgttcttgatataacctcccggaacggaaaaacattcctttgcttttttgtcgtaaagcaccatatgacgctcccgttgtttttctcccgcccaataattataaggcataaaaagcaatgaatcggtttctatcacctggttgcggatatatggagcagcaatcgtgttgtaggtcttccagtcaccatcgcaggcttccatgcgacagtcaatggggatggaatatttgcctaaatcgaagatataacggggttggagctccttttccgtcacaacgaacaaagtatcattgtaaaactctttgtagcaaatcaaatctttatagcggaacatgtatctgtctatgccactcatcatcagccaccgagttccgcttttgacttcaaacaggtccgaacgataaaaggtattcaatatattctctttttggctggagatatagatacgttctttttgttgcccactgctattcaacatgaaggtcgccaccaaggtatcattcaacatggcaaattgtgccgtttccttatccggtatctttatgtcataaaggaattttccggtttccatctcatagacattgatcttcccggaagttgtcagcataaagatcaatcccgtatcctcgttcacatctatctgttggaaatagttgaattgtccgggaccaccacccctcgaaccgatgttcctgacaaactttccatccgtcgtatactgatacaacctcgtattactggaaacaaaccaatatttaccggtctttaccaccttccccgaatttataaaatcgatcaggcacttatcattcgtttccaacggaacatactgtacggaatcggcaatatcgctcaacttaatctcccgctcgacaccgactcctgcctcgaacggaatggttatcggatactccgactccacaggttcgaattcgacagttaccggttgttcgacattctttcccgcacaagccgaaagaaacacgactacactcaacagaaatacttttctatattccatatttatatcgattatattgttcagatattctatctattccaagtcggcgtctttcaacattttccgtgctttctctttttcttccttactcagggcgagcgtatcgagtttagcaccgcttttacgcaattccttttctttttccctggcttttttaatatgttcctgcatcttctcgcgcctcaaacgttcatcttccggcatctgcggcagttgggcgaccaaggcacgcagatcagcgacagccaacttcgtcttcttcccatcgggagccaacatcgtcacttcatcggcattccggaaaaaggcatcttcacaaaccgcttccaagaaagggcggtaattataaagatacttttgcgacttgtctgtcttcatataggctgtcaggtaagtgtatctactgaaaatcgtcttttgcaatttttcctcctgctgaaagagtcccggatcgacatcccagtattgtgtactgatcttatacaggaagtgcaactgggttgggtcttccttccatgcggcataatacagcttttccgcttcgggccaacggccgtccctttccaaggcatcacctcggaaggtcgtcaacatattaactaggaattttttcggctgcatattcgtttccgccagatcgaaaagctcataagcccgtttacggtcgtatgtttttcccagggaagcgccatacaacatgactgtttccacatccgtcgaatctatttcataggccttctccagcagctcgaccccatcaagtgcatgaccggacatatagcgggccgcccccgcatatttaagattcaaaaaagaagaatcgccatcggccaatagaccggtatagactgaatcagcctgcttataatctttcgtcatatagagagccatccctttactctgccgtatctggctgttatccggattatagaacaaggcggtatcgcacacctgcaaagctccctgtccgtcccccatccgcaataacgtatttatcagagaagatgccacacgtacattttccgggttcagctccaaagcacgggcatacaaagaaagagcgatcatcgtattaggaccggtccctcttttaatatggcaatcagccagcccggtcaggatagaaggattttcaccttcgatggaagcaagtatatgatagtgttccgtcgctcgaccataatctcccaactgataatagagacgcgccaactgatagttggcatagaagttcatgctgtcggttcccaatactttacgataacattgtttagcttccgctatccttccgaaattgatcgcattcctggcaacggcgttcaatgcatccacattgttcgtatccatcttcaagcaatgagaaaaacactgataggcctccttatagcgcaacagtccctcatacgcctgcccgattgccgacattgtagcataatcggctgaatcggcaggagtaagactatccgcacgtgctacaacttcctgaaattgttttttattgaccaattcctgaagattaagactctgcgcctgtccccaaagggacagtacgcaaagaaacagtaatagagaaaacttacatttcataatggtatcgtattaatgaccgattctggtcaattactgcaaacggaaagtaaccggaaccgtatattttacggctacagccatattgttttgtacgccaggattccatttcggcatttcccggatcacccggacagcctccctgtccagcgaaggatcgattccacggatcacttcaatatttttcaaacttccatccgtgtcgacaacgaaagagcaagagacacgtccttgtattccattctcctgagcaatagccggatattttatgcgtgttgccagatatttcaacaacgaagcctgtccacccggaaattccggcatctgttgcactaccgtaaagacacgaccggacgtatcgacttctttaatctgcctctgcacgatacgagaggatgtttttttctttccaccggaaagccggaaagttaccggtaccgtatatttgacattaaccactttgccccgctgtttccccggcgaccataccggcatggagtttatcacacgcaaagcctcctcattcagttccggacttaccccacgaatcacttctgcctccgagatagccccgtcttttccaacaacgaaagaacagctaacccgtccctctataccatttttaacggccgattccgggtatctgacattcgtcgccaggaatttcagcagagcaccctgtccgccagggaattccggcattacctccacaacggtaaacacctggttacgggcacgtctggcagcctcaattccttcctccgatagcacatactcctcacgtttttcagcaggagaagcatcaccgacaaaagggaacggcaagatagcctccggtagcaagacatcggcaaacgtgctttccgtcagttcgtccgtgatccgggccaatgcatcgacattgcttaaaatcagcaaggcgcccacaaccggtataaaaatcaagtatttcgtcctacctatgctccgggaacgtttcttattcatcatgctgatccgatttttcagatgcagcatattaaagttattagataaagaggtcaccgatctattggtatgtgccaaccccaaaaggtgatattggtagctacgactgtcatagcccgattcaagtaccgtatcatccgccaaatattccagattatgacgtacctctcttttcaacagccagacaaacggattcacccaacagatgatacaaaccaattcgcaaataatcacgtcaatcgaatgccactggctgacatgcgtacactcgtgtaccaaaatctcatcgatctctttctcggaatggctgtcgggatgcagaaataccagccggaaaaaagaaaaaggaccggccggtttattcaacagatgtacacgtacgttacggatcaaagtcacttccgaccgccgtgccagtaacaagatgctgctcaactgcactaaaaaacggaacgataaggcaattacaccgctccaataaagataagaaataccgggaagtaacaaatcatgccaatttgtttggggaacattgccgggggttattgtcgtttcgggcaaaatggctgaatacatttgtatgacttccactatcggcccctgctcccggatccaatcctgaatattcatcagcggataaagcaatgacaccccgaaaaatgccaacaagatggtacggcgtagtttaaagaaggtgtccttataaaagaacagccggtagaaggcataaaggagtataaaagctacatttaccttcaagaagtaggcaaattccggtgtcatggcattatgtatttaacagtttattctcgtcctttttcaatcatatcgataatctctttcaactcatcggtcgatatcttctgttctttagcaaaaaaggagaccatttccttgtaagagttctcgaaatagttgttcaccacacttcccataaacgtccgtttatattcctcctgtgggatcagcggcctgtattcgtaagtatttccgtaacgtttcgctttcacgtatttcttacgttccagattcttcacaatagaagcgagtgtcgtataaggaggcttaggctcttcatacttcgccaggatgtctttgataaaacacggctcgatctgccagatccagcgcattacatcctcttcctgtcttgttaatctttccatgtttctatattattttttacgatcgtatcgcaaatctacgaatacatcgtaaatatgcaagaaataatgcgttaatttgtattaacaattaataatctatcatctattcgctgcatgcgccaaaaaggaatttatctataagcagccacaccaaagcatcccctatattaattaatgattttatatactccaaggggacactttttaagcatgggatttcactttttccgacaataaaaagtatttgaattagcagtttttacatggaatctgtattgtttataaataaccaacattttttgacaaaatagctattagagcttaacatatattatccgtaaaaggcttgacaaacaagcttagctagtgtatttttgcattgtggttttttcataatagtattagatttaaggttaacaaagttggttaggggttgtcgagatgacaatccttaattttttatatacctgcctctttctttgcacatcttgttgcctgtcatattttcatgtttttatagtgcttttatagtacgccactgataaaaaagtcttacttttaagccgcataattgacaaagaatctatataaatacaatatcatgaaaatgctatcttttattttggtactccttttagggggttttatgcctgccgggaatcttttggcttcagacaaagaacaaaatcctcattacattactgtgaagaacagccgggatctacaagcctatttccggtatgctcccgatcgcccgattgtaatcagtggacatcgtggtggaatgctagacggctatccggagaactgcatcgaatcattcgaaaagaccttgtcctatatggaatcgtttttcgagatagatccgcgtttgacaaaagacgggataatcgtattgatgcacgacgaaaccatcgaccggacaactaccgggaaaggaaaggtttcagattacacttatgcagaactgcaacaattcaatctggtggaccgaaacggcaacgtgacagccttcaaaattccaactttaaaagaatgcctggaatggagcaaaggcaaaacaatcctgaatttggatatcaaggatgtacctttagaagttatggctgattttatagaaacagaaaagcctgttaacgtcatgtacacggtacataacgccagtcaagcccgctattatctcgaccggaaaccggatgcgatgttttcttgctggtgtaagaatcgggaagaattcgataattatgaaaaagccggcatcccctggaaacaggtaatggcttatgtaggcccgaagatgaagcctgaacagcaaccactgtatgacgctctgcaccgtaacggagtcatgtgcatgatttccgttgctccgacacatgatcgcgcgaaaacggaaacagagaaaaccgccggttaccggtcagagatcagcactcgtcccgacgtgatcgaaacggactatccgtacctgtttcaaggactcgatttaacaaaataacgcagtttaaaggactctttatagccgattaaaatctttttgctatttatgctcatctgattaacaagtattagcgacaaaatgcttgacaaacgctcttgacgagtgtatctttgcaatgtggttttttcataatagtattagatttaaggttaacaaagttggttaggggttgtcgtgagacagcctttaattgtttatagaggttccgtttcttctcccacatacaaatcgtatacgaaaaagccggtcaggacagcttatagagatttcccggcaacgcttttaccttcccgtttatttccagttcgaacaatagcatagagagttgatgtaccggtatctccaacactgaggcaagctcgttgatatggatctcattccgcgttcgcataatggctaaaaccggattttgttccgaggtgaatgtttccgcctcggcgaaaaacaactccgtttgaacgggagtagccccagcttggatatcccaacaaagagcggagagcagatcgtccgcagaagtgatcaggccggctttattttgtcggatcaaattgttgcatcctttggaatggctgtcaccgacacgccctggaaagctatagacatcccggccataagagaatgcaatatcggcagttaccaaagagcctcctttttctgccgattcaaccacgatcgtacaatccgagattccggcgacaatccggttcctccggaggaaatttggacggtctggttctgtaccgctgggaaaatcggtcaacagaccgcccgattccagcatttcgacagccgtattccgatggcaggaaggatagatacgatccaagccatgcgccagcacagcaacagtcggaagtcggttgtacaaagcgttccggtgggcacagatatcgatgccgtaagccaatccactcacgaccaacaagtccgggatcacttttgccaagtcttttataagggattcggtaagctcccgaccatattcggtcgcgttgcgagtacccacaatactgatgatacgggtcgcatcaaggttagtatttcccttaaaatagaaaagtataggggcatccggacattctctcaagcgcaccggataatctgtatcagtcagataataacaggaaatattgtttttctcgataaaagccaactctttttccgcccgttgcaagatttccgggcgtttgatttcggcagcaatattgctgccgataccagggatccttcctaacaactgttgcttttcagtaaacacagcctctgcttctcccaaagcctgcaggagatgacgcgccaggatatctcccacaccgtttatcatagtaaggccgatttggtaaatccgtttgtcagtcatgtatgttttattctttttagcatttcgtcgaaatattcaccgcgtgtcaactttccgttctcaacgataaccgactcgacgattcctttcgtcgccaatgcattgtcagaagccctatatatatcctgctcgaatacgagcttgactccttttttatagacattgaggcaagagatatagctgtcgccgctcttgagcgaggtcttatactggatttctacccgcgatacaaatccgtcaacccctttttcgtgcatctttccgaagttctcgccaagcgactccaagaattcatgccgagtatgttccatataatgctgataattggagttgttgaccactccttgcaggtcgcattcgtagtcacggaccttgtctgtcagtttaaaaatatactctttcattattcaaataccttttcaagttgaaccttttccattttatacaatcggtcagacggccgaatcttctcgttcaccttgagagagaaccgttcacctttaacggtctcgtccaccggcttcaagtccacacggatttcttctatcgtctgcataaccgcacccgttgtcggtccggtaatcaggatctcatcacccactttcaggttaccggattccatttcgaactccgccacgccgatcttgtcgaaatatttgattcctttggcaacatacactttcttcttagtcgcgccggagccatatttgctactccactcacccaaccgttgccccaaataatagccgtcccagaatcctcggttgaacacactgcgcaggcgttcgtcccaagcggcaactttcttttcatcgaacgtgccattgcaataggcacgcacagcttccttatagcattcggtcaccaggcggacatattcaggaccgcgggcacgtccttcgatcttgaatacccgtacacctgcatccatcatcttattcatgaaatgaattgtcttaaggtctttaggcgacataatatactggttttcgatatccagttcgatattgctgtctttatcttttaccgaataagcacgccgacaaatctgcatgcaagctccccggttggcggaagcgttcatttcgtgcaggctcaggtaacatttaccggaaacggccatacagagagctccgtgggcaaacatttcgatacggatcagttctcctttcggtcccgtaatctgctggtcgacgatctgccgatagatttcatgcacctgtttcaaattcagctcacgcgccaagacgacaacatcggcaaaacgggcatagaatttcagtgcttccgcattggaaatgttgagctgtgtggaaagatgcacctcctgtccgatgctgttggcatagttcatagctgccacatcggccgcaatgatcgctgaaacttccgcctccttcgccgcatcgataatctcgcgcatcagaggcaggtcttccccataaataaccgtattgacggtcaaatagctcttaataccgtgctcacgacaaagcgcaacgatcttgcgcaaatcgtctgtcgtaaagttattggaagagcgcgaacgcatattcaatccttcgataccgaaatagatagaatcggctcccccttggatagccgccatcagtgattcgtacgaaccgacaggcgccattatttcaaaatctttctcgttcaagttcttatacatttactggttcgttcgcaaaggtaggaataatatccgagaagaattgcatgggtatccgtttctcagagcatcaaaatcgtgatcaaataccattttctataaagatttgcaaaacaaccatcatactgtcattgttgtcctttagaatctgttattcaataccttaagacatgatagtttctatttttaactatcatactactatcatgcaactatcatgatttcagcttatcattttatctatatcattgacagtatgacatttgtactttctattgatcaattactacactttttagtagatatccttttatccctgtttttagcaggaaatcagtacctttgtccccgtcattgataatataaatatgaaaataggtacaatagatttaggcgaacgccccgtcttcttagctccgatggaagacgttacagatatttctttccggttgatgtgcaaacgttttggtgccgatatggtttataccgaattcgtttcagcagacgccctgatccgcagtgtaaataaaacacagcaaaagctgaatgtggcggatgaagaacgtccggtcgccatacaaatatatggccgtgatgttccgacaatggtcgaagccgcgcaaatttgcgaagccgctcatccggacattctcgatatcaatttcggttgccctgtcaaacgagtggcaggcaaaggagcaggcgccggcatgctgcgcaatattccactgatgctagacatcacccgtgaagtcgtcaaagcggtgaacatccctgtcaccgtaaaaacccgcttgggctgggatgccgacaaccggatcatcgtagacttggccgaacagctacaggattgcggtatcgcagccctttccatccacggacgtacccgggcacagatgtacacaggagaggcagactggacactgatcggtgaagtaaaaaacaatccccgcatacaaattcccatcatcggcaatggcgatgtgacttccgccgaaatctgcaaacaacgtttcgaacaatatggcgtggatgccgttatgattggccggggcagcataggccgcccctggattttcagagaagtgaggcattatctggatacaggcgagacattgcctgccgaatctttttcatggtatctgaacatactgaaaaagcaggtggaacaaagcgtggaacgtttggatgagcgccggggaattctccacattcgccgccatttggctgcaactccgctgtttaaaggtattgtagacttcaagcagacacgcgtcgccatgctacgtgcggaaacagtggaagcattattcgacattctggattccatccccgacaaatttcatacaggatacggatttcaaagcgactctcaagtgtcagaatcgatcgattgttgatataataacagtgtgaatccgcacacagtgtcaattttaaaacaaaaagtagcaaatttgcaataaaatgtaattacaaactcttgcgtattcagtaaatatactttatatttgcagtgagtttttttcatagtattttagatctaaggttaacaaagtctttgcagagagggaatcgagagactgtttcactggaaagcaacaaaaaagccgcatccacttttattatagggagtgcggcttttttgtgggtttgaacgaacataaagaaagcccgttgccattggcgacgggcttttccatatacatacatatataatgtattagtcttgtaacttagcagagatgaactcgcggttcaagcgagcgatgttgctaacggagatgttcttcggacattccatttcgcaagcgcgagtgttcgtacagttaccaaagcccagttcatccatcttagcaaccattgcttttgcacggcgagcagcttccaccttaccctgaggcaaaagagccagctggctaacctttgcagagacgaacagcatagctgaaccgttcttacaagcagcagcacaagcaccgcagccgatacaagcagcagcatccatagccaaatccgcatcagccttagaaataggaattgcattagcatcaggaaccccacctgtgtttacagaaacgaaaccacctgcctggataatcttatcataagcataacggtctaccatcaagtcgcggattaccgggaaaccggcagaacgccacggctcgatcgtaatcgtctcaccatcattgaaacggcgcatatagagctgacaggttgttgcacctgttgccggtccgtgcggatgtccgtttacatacaatgaacacataccgcagataccttcacggcagtcgtggtcgaatacgataggttctttgccttcgctaaccaaacgttcattcaaaatgtctaacatttccaagaaagaaacactctgattgattttgtcgatttggtaagtctcaaactgtcctttatctttcggacctttctgacgccaaactttaagtgttacctttatatctttatccatgattctaatttttgtgattgatgattattacttcttgtagttacgtgtttgaggaacaacgaactgatagttcaaatcttccttcagcataaccgggtctttgtcttcaccctggtattcccaacaagagacgtacatgaacttatcgtcatgacgcatagcttcgccttcttcggtctgatgttccgtacggaagtggccaccacaagattctgcgcggtctaacgcatcgtgtgccatcaatgcaccgatttcgataaagtcagccaaacgcaatgccttgtccaattccacgttcaagctgttcgcttcacccggaatgaatacattgctccagaattccttcttcaggtctttcaacatttggatagcttctttcaagccttccgcgtcgcgtgccataccgacgtgttcccacatgatatgtcccagcttacgatggatagaatcgacagtttctttacccttcacgttcatcaacttcgcgatacgggcgttaatagccttttctgcttccacaaattcaggcaggtcagtgctgaagcgcggaacctggatctggtcagacagatagttctggatggtataaggcaatacaaagtaaccatcggccaatccctgcatcaaagcagaagcacccagacggttagcgccgtggtcagagaagttagcttcaccgattgcgaacagccccggaatagaagtcatcaattcatagtctacccacaaaccacccattgagtagtgcaatgcaggataaatcatcatcggagtttcgtacggatcatcgttcgtgatctcttcgtacatatcgaacaggttaccatatttctgtttaactacttccttacccagacggttgatagcgtcggagaaatccaggaatacagccaagcccgtgctatttacaccgaaaccggcatcacaacgttctttagcggcacgtgaagccacatcacgaggaaccaagttaccgaatgccggataacgacgttccagatagtagtcgcgatctgcttcaggaatatccttacctttttttgttccggcctgcaatgccttcgcatcttccagtttcttcggaacccagatacgaccgtcgttacgcagtgattcagacatcaaagtcagcttagactggaagtcacctttcaccggcacacaagtcgggtggatctgcaccatacaagggttagcaaagtaagcccctttcttgtagcactgccatgcagcagaaccgttagacgccatcgcgttagtagacaagaagaatgtatttacataaccacctgtcgcaacaacgactgcgtgagcggcaaaacgttcgatcttaccggtaatcaaattacgggcaataataccgcgagcacgtccgtcaaccttcacaacatccagcatttcatggcgtgtgtacatcttcacctttcccaaaccaatctgacggctcaatgcagagtaagcacccaatagcagctgttgtccggtctgaccacgggcatagaacgtacgggatacctgagcaccaccgaatgagcggttatccaacagaccaccatattcgcgagcgaatggtacaccctgtgccacacactggtcgataatagagtttgacacttcagccagacgatagacgtttgcttcgcgggcacggtagtcaccacctttgattgtatcgtagaacagacgataaaccgagtcaccatcattctgataattctttgccgcattgataccgccctgtgcagcgatagagtgtgcacgacggggagagtcctgaatacagaaattcaatacattgaatcccatttcagccagagaggcagcagcagaagcacccgccagaccagtacctactacaattatgtccaaacgacgtttgtttgcgggattcaccaatttctggtgatttttataatttgtccacttctcagccaacgggccttgaggaattttagaatctatttgagtcataatgttttattttcaaattgaaaaaataatatccgaaattaagcacctacaccgttcaggtagaagataactgtgataacagcgaataagccacaaataatagtggcaacccatttagagatacattcccaacggcttaaccaaacggtattgttccagccaattgtgtgaatcgcagaccagaaaccgtgagtcaggtgaaaccacagagcaacgaaccagatcagatacaacaccgtattcacaacattgccctggaagtagaaattgataaacgctgcaccatcctgcggatgaatgtcaccatgaatacctgccagttcggcaaacatcatgttgtaccagaactgagtaaagtgcagaaccatgaacaggataacgatcacacccaaaacaaacatgttctgagaagcccattcaacacctttcggacgagcgttgatggcataacggtcgttaccgcgagccttacgattctgcagagtcaagataatagcatacacgaagtgcacgactacacctgcagccaacaccaatgtaccgagcaaagcataccagttagaacccagcaaaccgcaaatcacgttatacgcttcaccagaaaatactgccgcaatgttcatacataagtggaacaccaagaacagaatgagaaaaagacctgatatactcattatcagcttcttcccgatagaagaattaagtaaccacataagataataatttaagttatttaattgtatttagaaatttcttccaatctatggttattatcgtgcaaaggtatgctaaatccccatatcacgcaaacgattaaagaaatatttcatcaattagaacgctgcttgctggctggttttattttcatcagatatcacaaacggattgtacgaaacgaaaaaatttcgtttttttgtagccgatacaggcaaggtcttgccggataactgattattatttaattgtcatattatgaaaactgctattttttctattggtgtttttttgatttctctgttcttaggctcttgtcagccttccgaaacatcctgttccgtcgtcgacacggggaaagccttggactataagataggaaataaactgttgttctcttacaactataccacggtttacccagcccctggcgttgactcggtctataaacgcagcggtttcatccatcctttgaagacattgggaggcgaagtgatgaccaattgttctcccgccgaccattaccatcatttcggtttgtggtatgcctggacgaaaaccacgttcgaaggaaacgagatcgacttctggaatctccacaaaaaacaaggaacagttcgcttccgcaacttcgagcacgtatccgacaacggttttgttgcgacactggaccatgtggtctaccccgattctcccgcagaaaaagtagcaatgaacgaacgcctggagatcaacatcgggacaacatccttaccaggttattacatcgactatcataccactatccgcctcgccagccccagcccgatcaccatggaagcttaccgttatggcggcatatgcatccgtacgcgcgaagactggaacgatcagacagccgaaatgctcacctcggaaggcctttcccgcgacgaagctgacggttcgagagcccgttggtgctattaccaagggaaagccggaaacgaaaaggcctgtatcctaatcgttgcctccccttccaacctgaactatcctgagcctttacgcgtatgggacaaaactgtcaacaagcctgccggtgacgtcatgtggaatttctcaccgaccaagcagaaggcattcacattggaacccggtaaagaactgagcctgtcttaccgcatttatgtattggacaagaacatcaacgctactacggcagaagtgctgtccgatttcgaacgtgattgaatttctactaaaacaaactgacaatttgcagggcaaggtaaacaagaaaaggaaaaagggcttgttctcctatatcatcaaagacaaggctcttttatgtaaatacagctacaaatcaatgagaaacacgtaataaaacttacccaacacccccatgtatccgcccccgacacccggatctataagagcgtaagatccgggtgtcgggggcggatacatgggggtgttggtgaaattgtctccctacttttaccttaaaatgcttggagtttattcatttaaaacagatagatgagcgattgtctcgtcctgaaataggttgacttcataaaagtcaacaaagatgaaaaaagagaagtcattgactcgtcgcaagggtgaaccttatcctttggagattcgcctagcagctataggtgaatatcgcttaggagtaagccgtaaagagatcgcctttaaatattccataagcgaccctacggtaatatcgcattggattcgtaaatttgaggcaaaaagacaatcatcagtgtcaataaaaccactgaaactcaaaaagcgatcaataaaaatgacagaaaacgaatcggatctttccaaacggatcaaagaactggaacgcgccctcaaacaaaaagagttggagttaaaggacaaagagaaggaactgaagcatgagcaagctcatcgccgtgcgatggaaatcctaatagaactagccaatgaacactataacatcgatatccgaaaaaactctggcaccaagcagtgaaaaggcttcatgacaatcagccggaaataagtatccctgattgttgttcgttgtttgggtatagcaagcaagcctattataagagagaaaaacagttacaatcggaattgttgtgtgatgaaataatccttaaaatggtaaacagcctgcgtcaggaccaaccggttttaggtggtcgtaagttgtatcatatcctaaaaaccaagatacatcctgatttggatatagggcgcgataagttttttgacttgctacgcgacaatggtttgttgatcagacattccagggtttatcggccggtaacaactctgtcatggaaccgttttcataagtatccaaatctgataaaagattatgatccactatcagccaatcagttatatgtagctgatatcacttatgtccgcaatgtcgaaggaagattctattatttgagtttgctcacagatgcatactcccgtaagattgtcggttgggccctggaggattccctggagatgtccggtccgataaaagcgttgaatatggccttggaaacacttcccccgggaagcgatctgatccatcattcggatagaggagtacaatattgtagcaaagattatatctcaattttacaaggcattaaatgtcgtataagtatgacagaaaacggagatcccagagagaatgcaatagctgaacgtgtcaatggaatattaaaagaagaatggttgaataaagaaatgataacaacgctcggccaggctcgggatatagtgaggaaagtgatcgatatttataacacccggcgccctcacagtagtgtggaaatgttgacacctgaagaggcgcatgcgaagaaggggcctttaaaaagaaaatggaaaactatttataaacgtaaacaagctattcttttatgaacaggattaaactgatatatttgcaacaaaatagaacagagaccggaaacgctcgtcgggacaggtggccctgtcccttgccgcttgggcgctccccggccgatgagtttggctgtgaaaagccccctgtcctgtagtgaaacaggataaggtaacttattttaggattaagaaaggattgtctgtttttttacatttatagacaacctataacaggatttttttaatacacagtcaaccaaaatcaggacgagacagattacagatagtgatagaagcgtgatatataaaacaggtatctatcactttagatacgcactgattatcaagactcacacgacatttagtgatagagtgacagatgttcatgaaaaaacatccaagaaatcaccccatcccgactactgagcttcaacaaagttgcactaaaattagataaattaacacaggcattgtatttcattgcctattgcccttttcccagtttttcgacagatacaaaatcaagttctgtgctgatgagaatatgcataacctcaaaactttcagacaaatatgcaatattataaaaataagattattttttgaccgcccatgcacagaaagagatataagttctatcagaactcatgtatttatgaagaaatgtatctgataaatgtgaatattgtacaaaaatagagttgaatgataagccgcaaattacttcttgtgcttaaaaaggttcaaaagtctgatattgtctgatgcttgttgatagcctgtaagtctgaattgttaaaaatgagtgccatatgaacttttttatcggaaaaacatacaacgaaatgaaaatttcatacctttgacccggatatgagataattaaaaaccatagttctgatagaactaaattacaaaaacacagaaaaacgctataaaaatatgcaaaatctaatgagcatgatctaataaagacactcaacagatgtaagccgttttcgtagtatgtattatttcttttaaatatatactctatgttgaaaaaaactaaattagtaagtctgatgctactggcaggaactttagctgttccagaaagtgcttttgccgaaattactccggaaaggccgtcagtaagtctatcccaacaaaatgggaaagtagtatgtgtggtggaagattcgttcggccctgtgatcggagcttcagttgttgtaaaaggaacaaccaacggaaatgtgacagacatggacggcaaagttgttttggaaaatttgaagaaaggagatgttattcaaatttcttacattggatacgcgacacaggaaataacctatacaggacaaccgtcaatccctgtaacattaaaagaagatacccaggcgctacaagaagtagtagtagtaggttacggtacacagaaaaaagagaatttgacaggtgctgtggcagctgttgccggtgatgtactagaaaaccgtcctataacaaatgttggacaaggattacaaggtgttgttccaaacttaaacgtcaccatgagtaaaggtggtgctcctggtagtagctctgactttaatattcgtggtaacaactcgattaacggtggtagccctttagtgttagttgataatgttcaaatggatgccaaccttgttaatccggaggacatcgcgtctatttctgttttaaaggatgccgcatctgctgctatctacggtgcccgcgctgcttatggcgttattttaattacaacaaagaaaggtaaaagtgaacaaaaacctcagatttccgtatcagcaagtggttattggcagagccctgcattaaggatgcacaatatcaactctttggagtatctggaaatgagagatattgctgccgccaatagcgggatgagttccttgatcactccgggacaattagactatgtaaagaaatatatggatggctcttataagtattcagaatatttcgatcagtcgcaagatcaaagtcgatggatttattgtggcaacactgattggtttaatgaattgtacaaaacaagtttctctcaacaatataatgtaaacattagtggtggagactcaaaaacaacttattacggctctgtcggatttgctgaccagaatggtattttaaaaacagctgatgataattacaagaaatttaatgcgacactgaatctttcttcacaactgacaaagtggttgcaggtcagtgccaaaatcgcagataattattcaacagaggatcaccccattaccaactctacagcaggaatcgatgcctatggaggtatgttgaaaaatgacttaagcccgttaatgcctgtacgttttggccatacaggaagactcgtttatagtcctggcgcagcagccatcaatgattctaacttaggtatccaaacttcaggcgattatatctataaagaagaaggtattaacaactattcaggtcagaacgggaacacaaatcccgctgctgtaggagatttaggcggatataccaaatataaaatcaacgatttatggttgacaggtgctgtaaaaatcactcctttggaaggattggttatcaatgctgattatacatataatatttatagcaagaatgcatcagaggttcaacggacatttacagattatacggctgtagctggaacagaagctctttatggttggacaaagccaagttatgcaaattatactacaaatgaagattactactatgcattcaatgcatttgcagaatattctaaatcatttttagaaaatacgcataactttaagattatggccggttataaccaagaaaagaaatccaacaaaaaatataatgcaaaacgtaccaatctgattgttgaagatattcctgacttggatttggcgacaggtgaacaaagcatgtcttcagaagatacatattgggcaattaatggtttcttcttccgcttcaattacaattacaaacaacgttatctactcgaagttaacggccgttatgacggttcatccaagtttgcaaaagatcatcgttatgcattcttcccatctgtttccgcagcatggcgtatctcagaagaaaatttctggcagccgttaaaaggttggtggaatgatatgaaaatccgtggttcttatggttcattgggaaatcaggtaatggatgatctaggtaatttcccatatttagcaacatatgggacgaattcttcctacaattatttgattaacggctccaaacctgttattgtaaaagcaccggggcttgtcgctcctgattttacttgggaaacagtcactcaaatggacttcggttttgatgcttcatttctgaataatcgactgacgggaacatttgactggtatcgtagaaatacaaaagacatgttggtagccggagcaactttacctgcaacattgggcgccagtgttcctaaaagtaactctgctgacatgaagaccataggctgggaactttctttaggatggaatgatcgattagaaaatggattttcttattgggtaaaaggtgttttgtctgactatcaggcgactattaccaaatatgccggaaatgacgcaggtttctattcacaaagtgatggtgatggtaaatattatgtaggacaaaagattggtgagatttggggatatcactcaaacggccttttccaatcagacgatgaagctgcaacaatagaccaaagcgaactttatgctggaaaatggggtgcgggtgatgtaaaatacgaagacttagataatgatggtaaaatcacaaaaggggaagaaacaatctataacccgggtgataagagcatcataggtaataaaacacctcgttatcaatttggtattaccgttggatttgattataagaacttcgatttcgagatgttttggcaaggaacaggaaaacgtgactatatgttgagtggcgctcagttctggggattcactagccaatgggatgttccatatactccggcccttgattattggacagaaacaaatacagatgcttattttccaagaccaggatggcaaaatggcggtaacagagtcacaagtgaccgttatttacaaagtgcagcttacgggcgtttgaagaatttgacggtaggttacacaattccgaagaatctaacgacaaagtggggcatttctcgtttgagattatatgtgacaggagaaaacctactcactatcactcctctgaacgatgccttcgatcccgaaacattgggaggaatgacatacccgattaatcgaaaagttgcaattggattaaatttaacactgtaaaaaacgaaagatgacaatgaaaactaaacatatcttattaggattaagtcttggtttgttaggaggatttacggcttgtgacgtgacagacctcaatccaaaagacagcattaccgacaatagctactggaatacagttagcgatttggaaaattatgccaaaggcttttacatgaacctgacaggaaaaggtttaagggcagatggaagtgaaaatttggatgatttaaatactcttgatgaaagaagtgacaatcgtctggtcgcttctcccgaccaatggttgttcaacgaatgggttataccttctgaagcaaatttcgattcaaaatggtattggaacaatattcgtaatctaaactattttatgactcgttaccaacgggtaaatgcgacagaatctgaagtaaatccggttgttgccgtaattcgctttttccgggctttcgattatttcgataaaatcaagacatttggagatgttccttggtatgaaaaggatttgacaactgccgatattgacgaattgtataaagcacgtgacgaccgtgactttgtactagggaaaattatcgaagatctggaatttgcaattgaatggttaccggaaaaaagtgcagcagaggtaggtgctttacataaagatgccgctcgtacatttttagcacgtgtttgcctacattatggaacatataaaaagtatcataatgtttcgacatcacctacatctcaggaattattacaaaaagcggcgactcttgccaaagaagtgatggatagtggtctttacgatatcgtacaaggctcggatgccggagcaaaccagtctgcttttgccgattatcccttgtattatgcaaaccagtttacacaagaggatttaacgactaataaagaatgtattttagcacgtgttttcgaagcagacgtattgactcataatctcgctcgtggtggaggagtcggcctttctaaagattttgcagaatcattcctttgcaaggacggtttgcctattgcaaacagtagtgaatacaagggagatgaaacactggatgacgaaatggcaaaccgcgatcctcgtatgtatcagattatagacagtaaatatcgtccatatacggtcaaaagcaatggtatgcgtgtagtaaattccggtattgatgataaaaaggaatttagtccgtctgaagaaccaggaacaaatatccattcagctccgggattaaccgggactgccacaggatactcacctatcaaactggtgtcagcaagccagagccaacaagatgcagtgaaaacatcttcttacgactggtttgttttccgttacgcagaaatcctgctgatctacgctgaagccaaatgcgaattaggagaatgcacacaggctgttttggatgagacgattaataaattgcgcgaccgtgttgagatgaaacatttaacagtatctccagtagccgatctgaatccggttgattatgggtattctataactccgttgttatatgaaatccgccgtgaacgtcgtatcgagttggctttggaaggtttccgttatgatgatatcatgcgttggaatgcgatgaaactattcgaaaatcctaaaacatatctaggcatgcgtgttacagataaagtaaaagcgttataccaacctgaagtatttgaaggatcaacagcccgtgatttaatcgaatataatggtaaaacttatatccgcatgtattctggtaaaagtttgaacgaagccggccgtaaatggacaggaaacgacaagcgtctgtactatcctatcccaacaagtcagattacattgtctgcaagccatggttctcttctaaaacaaaatccgggttgggaataaatctcatacaagagggaaggttagccttccctctttatttccctcaataaaatataatgagaatatattacttatcttattgtctgctggctaacaggacgtttatattacaaccctatagaatatatagagagttacacacatcataaatgttccgaaatcaggcatgtatacagtagatgttcaaaacgggattttatatgaacaagaaagacttaatattaaatattcttttatttattagtcaaataatagtcttttattatttcttctgctatttattcccttttaaggaacagctacaaatgtttcaatttacatcacagtacctaactgaaacactgaagcaggctggtggtgtcgctatttatatatcggaatttctctctcaattctatgtggtattttggacaggacctatcatttctgctctacttttaactttagtggctttattatcatcattaatactgaaaaagattaactcacgaaacgatttacctcttattttcctgttaccctggctatctttactaattattagtttagactatgattattatgaacaaggaactattgcttatttatttttattgctttttctatggctatatacaaacataaaaacacgaataaaatttatttatggcatttgcatcattcctattttatatggaatagcaggtcctatcgtacatttatttgctatatcggcattgttctttgagtttttaaccaatggaaagaaaaaatatattagtattatttatttgttgattgccgcactttcagcaattgcaggtacttacttaggatatagtagaaatttaactttagcatttttaccagaggcttattgtaatccactacaaacagtatccgggatatattatgcatggtatgcattacctatgacaatgcttctggttgcttatttgaaacgatacaaagaacccgtttctctaaaagggaaatgtatatgggaaggggcacaatgggcaatcatgtttctattggtctatcaaggtatctttcattttgggaaattggatgcacagcattccatgaagcaggactatttgctccggacggaacagtgggaccttgttatcagtgaatttaaccatgatgtattgtctaaacgccgaatgtgcggtttaaacttagctttggcacataaaggccagctttcagagagattgttagattatcctcaacacggtattgaaaccttgatgctacattgggatcagtcgatctatacagcacaactgcatagtgatctgtattattgtatgggaataataagcgcagcacaaaaattcgcttttgaagcgtttgtcagttctcgttcttccggtaatccccggatgttgaaaaggctgatagagacaaatctgataacagggtcctatccgattgcggataaatatattcaattgttggaaaagacttggttctataaggattgggctactgctcaccgtcgatttctttacaatgataaagcagtcgaggaagataaaattttaggaatgaaacgtcgctgttggaaggccgaagcctctgctgcaaaactatatacagatcctgtcagttcattaataaacttgctcccggcttgtccggataataaagcaggattagcatatttgacttcgtttttactgttgaacaaagatattgaaacttataaaaccttgcaggagagcttgtaccgttctcccgcctggcgcgatatgacggaatgccagcaggaggcaatcgtgatttgcagtcccaatgatccgcacttctggttagagcatggggtgagcatcaaagtaaggaacagagcgatcgcttttatgcagaaagtgcaagatatttcccgttcggggcagaatcctgcggtcgctttggcttccgagtatggcaaaacgtattggtactattatatgtttaatatgatggacaaatgaaacaattgcttttttgcatattccttttgttgttggaaggatgttcttccaaccagccacctgccgtctccgggcagatagatgaactgccgaccatctatccggattatattgacgtaaccataccacaatcgatcgcacctttgaattttgccgtgcaaacggaagggaaagcatgcgcggtatttacaaccgaaggatatgcatttaccgtttacgcctccaacggagccttttccattcccaatacagactgggaaaagttattgactgcggcaaaaggaaaacaggtagaggtatctgtcctgacagaagaaaaagggaaatggaatgcctttcttccgtttcatatccgggtttccgaagacccgatcgatccgtatatcgcttaccgcctgatcgatcccggttaccagctatggaacgagatgggaatctatcaacgcgaattatcctctttcgatcaggaaccgattctggaaaaccgcctgacggataataattgcatgaactgccattcgttttgcatgcaggacccggacaaaatgctgttccatgtccgtgcaaagtatggctgtaccgtgtttgtggatggcgaccggatagaaacgctcgatacgaaaaccgatcggacgatatcggcattggtctacccttcctggcatccttcgggaaagtttgttgctttttccatcaataatacaacccaggatacgcatccggtacatcgtacagaagtatatgacaaggcatcggatgtagttgtctacgatgtagaaaaacaggaaatcgtcacgactcaagcactattctcaaaaaaacattttgaaacattcccgactttttcaccggatggaaaacaactttacttctgttccgccccggcattgaaagttccgggcgaattgcgtgaccttcgttatagcctttgccgcgtttcttttgatcctgaaagccggactttcggttctgttgtcgacacgatctttcaagcggaaacagaagggcaaagcattttgtttccccgtgtctcgccagacggaaaatatctgctttgtacaacgacatcttacggaaccttccctatctggcacaaagatgcggatctgtgcatgttcgacctgagcacgagtgcgcaagttccaacagaagaagcgaacagccctgatacggacagttatcattcctggtcgtccaacagcaagtgggtggtattcagcagccgtcgtttggacggcttgtacacacgtcctttcattgctcatgtcggtgaaagaggcgttctctcaaagccgttcgtcctgcctcagaaatcaacggaatattatacatttctcaccaaatcgtataatatcccggaatttgtcaaggggaaagtgaaaacggatacatacaaattagtttcccgaataaaagaagggaaaaaccagcagatctcatttacaaaataacaacatgaacacaaagaatcttttaatcaccggtatgtttgccgggttatttctttcctgcaaggaagtagagccgcccgcacctgttttgccggttccgacgccggagcagatcaaatggcagaaaatggagaattatgcattcgtgcatttcgggttgaacacattcaatgatttggaatggggctatgggaatacacctgcggaaacattcaatccgacagacctggattgcgaacaatgggtacgtatcatcaaagcggccggcctgaaaggggtgatcctgacagctaagcatcacgacggcttttgcctttggccgaccaaaacggtcgactataatatctctaactcgccttataaaaacggaaagggcgacatggttcgcgaattgtccgatgcctgcaagaagcacggcttgaagttcgggctttacctctctccctgggatcgtcataatgccgaatatgggcgggaaggataccagaagacctatcatgagcaaatcaacgaactgatctccaactacggtccgttgttcgagttctggtttgacggggcgaacggaggaaatggctggtacggtggaacgaatgaaacgcgttcgatcgatccgaaaacctattacggctacgagactgcccgtgaaatgatcaaagcgaaacatccggaagcgatgatcttcggcggaacggttcccgatatccgctggatcggcaacgagtccggttgggccggcgaaacaaactggtcgccctattcgttggacaaggagacacattatacacaaaaccaatggggaatgaaagacggaaaccagtggttgccgggagaatgcgacgtatcgatccgtccggggtggttctatcatcatcgtgaagatcatcaggttcgtactgttccgaatctggtcgatttgtattatcgcagtgtggggcataatgccaacttcctgctgaacttcccggtagcactgaacggacagattcatccggtcgattcggcacgtgccgtcgactggtatcatacgatccaagcagaattgaaagataatcttttggcaggtatccagccaaaagcaagcgaaacccgtgggggtgcttataaagcatcgaatgtgacggacaacaactgggattcttattgggctacttccgacgggatgacgtcgggctcgctgactttcccgttaccgacagggacttcgctgaaccgggtgatgattcaagagtatatacctcttggacaacgtgtatgcgcctttacgcttgaagtggaaaaggatggcaaatggctgccggtggaaacaaccgatacgctttcgacagtaggttacaaacggatcgtccgtttcaaaacgactccggcagatgctttgcgcattcatttcacagaggcaaaaggcccgttatgtattaataatgtggaagccttcctggctcccccgctgttggaacagccgcgtatcgtgcgaaatgcgaaaaatgaagtccatatagatgtggaaagcgaaggagccgacatttattatacaacagatggaacggagccgacggcacagtctgcaaaatatgaagttccgtttacattagacaagaaaggaaccgtcaaagcgattacttatgatgcgcagtccggcaaatccggtcctgtagccagccgccgtttcgacctgccagcagccgattacaaggtgaccagccctgccgatgagcggacaaatctcatgtttgacggaaacggttattccacctattatctgcccgaaggcaaaaacgaaatagtagtagagttggccgcccctcatacgataagcggttttgtttacacccctaatcagggacgcgattcgcagggacatatttcaaactatcaattgtcagtggatggaaaggtcgtggcttcgggcgagttctcaaacatcaaacataacccgattgaacaagaaatacattttgctcctgtcaagggcaaaaaattagtttttaaggcaacacgaattgttgataacgtaaaacgtgttggaattgctgagttttcagttatcacggaagactaaacgattttcaacataatttgtgtttggcagcaagtgcctgtgaaggtccttgctgttttttttagggccattcggtccttccgcaaaaatcgcccttatgctcctgaagtcatacaccggattctccgacaggcagctggtggaacatctgaacaggaacatacactaccagatgttctgtggaatcatgagagccacatgcgttttcctacggacatgaaactcctttgggaaagcatcgaatggctctacagccatatatgccggcattgcagggatctctgggcataagacgtccgcgcaacaaatacaggaatgtggcggaatcctatctgtcctactgcaagaaaagaaagaggagagcttcaaggacaaaagtgattatactctatcatcttcatatgccatgtattttgtgggaacatttactgaatatccctaaatagacattttatttaaatattgtttattgaaaatcaactaaacctaaacagcttttgcagtgatagtttcaaaaaagatgcatgagttcgataagaactatggtattatgaaatctcatatccgggtcaaagatatgatttttttttatttcgttacgcgttttttgtaaaaaaatcacattgattttatttttaacagttgatttttataaattcttagcgatcattggggaatactatgagttaaaatttgtttgtcgcgatgtcgactgtaaaagttttaaatttatcacagattatgttttacataataccatagttcttatcgaactatgtaaaaacacagattactataaagtatacttaaatcaaataataagcaaagtccaataaggcatttaacagataaaagtaattttcataagatgtgttttaatacataatttatataagaacaaatttatcagtctgattttattttactcatgaaataaactcaataacaatctaagcctcaaatgatgtttagattcaatattaacaaaataattttattatgaaaaaggaacctgtatttgccactttagtgctattatcggtcatgacctcaccgaccataatggctacgccatggcattctaacacaaaggttggtccagaatcaatcgtaacaaaaacgagttctaaacaaaactatgtcaacgctaagacagtaaaaggcacagttgtcgatgaaaacggtatccccattattggagcgaatattgtcgtagcaggtacaacacatggtacagttacagacatcgatggtaacttcaccttagagggagtaaataatggtgacaaactgacaatatcctatatcggatatattgaacaatcactcgttgttaaccaaaattcggagtacaaaatcgtcttaaaagaagactcgcagagtttagacgaagttgtagtcgtcggttatggtacacaaaaaaaagtaaacctgacaggtgccgttgcagcaattggtgcagatgaaatcatccaagccccggtagccaatatctcgaatgccttggctggtcgtctaccgggtatccgtgtacaaaacacaggcggtacgccgggtgccgaatctagcgtggatattcgcggattcgggaaacctctgattttggtagatggagttgaacaaccaggtttccaagtagacccaaacgaaatcgaaagcatttccgtattaaaagacgcctccgcagccatctatggagtgaaggcaggtaatggtgtcgtattgatcacgaccaaaaaaggtgcagaagggaaagcgcagatcacatacaacggatctatcggctggcagaacttcacaagctatccagatatggtagatgctgccggatacgcagagttgaccgatgaagatgcgatcaaccgaggaaatgcccccgtttatggaccggataaattagccttgttccgcgaaggcactcaagaaggatacaaaagctacgactggaaagacatcctaacccgcaagaatgctccacagactcaacataatatcaatgtgaacggaggaaccgaaaaagtgaaatacttcatgtcagtaggttacttaaatcaagaaggcttgtatgccacaaaagatatcaatttctctcgttacaacttccgttccaacatctctgcgaaaatttccaagtatttgaccgcagatgcgcagttaagcggacatgtacaagacaagatggcaccttatgacgacgatacttatattattcacggtatcacccgtatgcacccttactattctccatacgccaacgacgaagaaggtaagcactatggattaaccaacttccaaaatcccctggcacgttcagatgcagatgtttctggctatcgaaaagaacgtaagaaattattcaatggtgttttctccttaaaatatgatatgccgtttattccaggactgtcagccaaggttttattttcctatttgacaaaagtagaagaattcaaaacctttgcgaaagaattcaaactctattcatacgataaggaatctggtaaatacaatacggttttcacaggaaactcgccgtccaacttgactcgcaaagattacacacaagagcagaacatgcttcagttctctctgaattacaatcgcacattccttgacaaacacaatgtgcaggctttgttcttgtatgaacaacgtgaagatttggatgattatttgcaggcctaccgtcaatttgcaattgatgcccttgaccaaataaattcaggttcggacaagaacaaaaataacgcaggtgtagcaagcgaattggccaacgcatcttttgtaggacgtatcaattatgattacgcaagcaaatatttattcgaattctcttttcgcgaagatggttccgcaaaattctacaaaaacaaccgttggggattcttcccgagcgtatccgtaggatggcgtttatccgaagaatcatttatcaagaataacacccaaatttttgacaacttaaagatcagagcatcatatggcgtcatgggggatgaccaattcttggactctagcggtaatccgcaagttcttccgttccaatacctgacaggttacaactatccgggtggaacaaattatatcttcggtagcgatgtagtcaattcactgataacaaaaggattggctaacacagaatattcttggttgacatccaagatactaaatgtcggtttcgatgcatctttgtggaatcgcaaattagaagcaagtgtagatgttttctaccggaaacgcgacggcttatttgcataccgttccggttcattgcccaacacttttggagcttccttcccacaagaaaacttaaacagtgatgatttccgaggttttgagttggtattaggacacacaaatacagtaggagactggacttactcggtcaaaggtaatatgtcgttcactcgcgcgaaaaaccgccacattgaacaagctgatccaatcaactcctataagaactggaccagtaactttagcgatcgttggaataatatgtctttcggttacaaatgtgtaggccagttccaagatcaagaagacatcaataactgggcaatccaagatgacgccggcaacacgactatgatgccgggcgacttgaaatacgaggatttcaatggcgatggcgtaattgataataacgatattcaacctattacccgtagcaacacgccagaaatttatttcggtttggacctgagtgcctcttggaaaggtttcgacttctctctgttgatgcaaggagcaaccaattacaatgtatatatgtctggttgtttgggtaatgccatgttcaacgggtccaatacattggaatgctttatggaccgatggcatcgcgaagacttgtatgatcctgaatcggcatggattccggggaaatatccatcaacatggaactccgggaagccatctaacactcgtgtttctaccttcaaccacatcagctcatactacctgcgtgtaaaaaacatcgagttcggctacaccttccccaaagagtggttaagcaaggtttatgttgaaagattacgtctatatgtatccggaaataacgtactgacatttgataatttgccgtttggcgacccagaagcacccagtagcgatagaatcttatatccgcagttgaaaatttggaatattggtgtaaatgttacattttaagaatttgattaaaatatgaaaagcataaaattattagtactgtctttgtgtgggctatttagcatgtcgtcctgtgtcaacgacttcttggaccgtgatcctatggatattatatctgaagacttggtttggtccaatgagaatgcggtcaacgcttatatggccggaatgtacgaagatatgttcgtcgaacctcatgcatggttgattaactggggtaccttggggcattacacagacgaatccatgcgtagttattcatggggctatccctacaccccggtattggatctctccagcttgcaacaatgggaatacaataaaatacgtatcgccaatgtgttcttgcaaaacatccaaacctctacattgaacgaggatttgaaacaacgttggacagcggaagcacactttgtacgggcattccactatttcacaatggcaaaacgctatggtggtgtacctttgataaaagaggtacaagaatataccggaaacaacgtagaagaactaaaggttccgcgcaatacggaagaagaagtctggaacttcattgctgaagagtgtgatttagcgatcgccggtttgcctgaatcctacggatctacagaccagttccgtgtaaccaaatatgccgcagccgctttgaaagcaagagctctgctttatgcaggctccatcagtcgctatggcaccgtacagttgaatggcttggtaggtattcctgcagataaggcaaacgactttttcaaaagatccatggaggcctctgacatgatcattaaatcaggcaagttcgctctattcaatcaagatccggatcctgctgccaactaccaacaactgttcttagacaaaacaatgaacagcgaagctatctttgtaaaagcttttgcatctcctgacaaagcgcataatttcgattatgctatggccgctccctccttcaaaattgactggggaaccaatacaagtccgacgttggaattagtagaatcatatgagtatatagatggaacacctggtacgttaaaaacaaccgatgcaagtggaaatctgatctattacgaaaacgcagaagatattttcaaggataaagacccgcgtttcttcgcctctattctttacccaggttctccttggcaaaacggagagttggaagtaagacgcggcattatcaaaaatgatggctccaaagaggctgcctcggcattcacggatgtgttcagcgaagatccgtctatgaaaaccggaggtaaagatgggctcgtcatggcaggtgattgcagtcgtacaggattttatatcaagaaattcatggatcctaccaatcgagtagaaatggaccgttccgaaacgaactttatggtgttccgttatgcagaaaccttgctgaattatgcggaagccgctttcgaattgggactaaaagaccaagctctccaaaaagtgaacgaagtacgtaaacgtgctggtatcaaggagaaaaatagcttgacaatggatgatatccgaaacgaaagacgcgtagaattggcattcgagaatttacgttactgggatttggtccgttggcgtgttgcttccaaagtaatgaacaacacaactttctcggcattaattccttggttggactataagaccaaaaaatatgttttcgagaaatcggtcaataccttgaatctgcccaaaacgtttttggacaaacaatactacttggagattccgggtgtagctcaaaacgatttattagaacaaaatccgggttattaatcttttcatatttaaagacatgaaaaaaatatttttatatgcaacactaatttgtggcttgtgctcctgcgggcttgacaactatgacgcacctaccgcttccctaagtggagcgatcatagacaaagagacaaaagaaaatgtccccggacaagctcaaaacgggacaaaaatacgtatgtatgagttttataatgacgaatggtctgtacaacccaacgattcatgggtgagccaagatggcacattctcgaatacagcagtatttaccggtaaatacaagattttagccgaagggccttttgaaacagtagaaccgatcgaaatggaagtctcaggttcaaaacagatgaactttgaagtaacaccgtttttgcgcatatcggcagaagcgacatccaacgaaacaggcaaagttacggttaaaacttccgtagacaatgttttagataaaacaatacaagcagtagaattctactactgcaagactccgtatgtggataaaaacacctttacggctaaagaatctgtaaaacttggtacggagaccgaattagacattgccacttattctcatacgttcgagaatctcaaaagcggaaagactttctacttccgggtaggagccttagctgttaaccctggcggattctataattatagtaaagtaatagaagttaccgttaaataaatcagatctatttaaggactgtttttgcatttttcattaacacaagaaaatgcaagacagtccttaatcatcacaatgtaaacggcctaatatgagtaaaacatccaaatatctgctgatgataggtatctatctatttctttccttgctttttcttatcggaatagagtgtggattgagagctttcggatatggtgtagatttagaccatcttttcttgcaaacagcgaatggtaaatatttatatctcaacaaaaacatcagtagaaggtactttactcaatcacaagccacaaacggaaatgtagagttttttcggaaaaagaaacaaaaaaacacattcagaatttttgttctgggcgaatcagcagcaatgggatttccctatcccaataatatttcgttccaacgaatgctgaaataccaattgcaaaagacaaatccagacaaagatatcgagatcatcaatttagctctgactgcaatcaacagttacactttttacgatttcgcacaagaactcgttcattttgagccagatgcgatttttatttatggtggacacaacgagtattacggagctttgggtgtaggctccaataatacactcggtagccatccaacatttatccgttgggcaatccgtttgcgtcagttacgtcttactcaatggctcgattctttaaaaagccacttaagccctcaaaaggagttctcagacaacttgatgaaatatgtggtcaaagagcaagtgatcccctacaaaagcaaactatttcaacaaggactggaacagtttcaaaacaatatgaaattagtacttaatctgttcaaaaaacaccaaataccagttttcttctcaactgtcggagttaatttaaaagacttaaagcctttcaaaagcatatcgtctgacgaacatagcgccgatgaatattatcaactggcacaagaacaattgcaagcacaagatagcatagcagcatacacatccttcagtcgggcacgagacttggacgcccttagatttagagcatccaaagagatcaatgagatcatccgagaattagccaaagatgacgataatatttacttggtaaataccgaagaggaatttaaccgaaaaagcccgttcggtattcccggacgagaattattgctggaacatgtacatcctactatcgaagggcatcgggtgatcgcaaattgctttttggaagttcttcggcaaaaccaatcctgtttttccaacaaaaaactacaaatcggcacttcagaagatctatacaactttcctgttttagagtttgactccttagctggagaatatgcttgcttacaactgcgtaaaggattcccattctatgaaaaagatctctctacaattacccctaaaacagaagtagaaaagatcgcagcaaactacgtacgacaaaaaaactggtatcaatccatggatcaactgtatcagtacgcacttaatagcaagaatgaaaaattatgtttggatattctccgggttcgtatcacggataacccttacgacctcaccttccttggtcaaggaggagaattcgcagagatccgaaaagaatatcctttagctatcttcttctacacacgaagtttccgcctgtatcccacggttcaaacagcacagaacttagttgcaatccatttacggctcgatcaacccgatctggctcttccttacattgaatatatactccgaaacggaaatccgaaatttaacggactcaaagagctttgccataagatcatccagtacaaacaagaattaaattggcaatcgaatgattcaatccggcaagcaatccgatcgatctatctacaaatgggtaatcaggatgcagccgacctatacaattaataataaaatgagctatattttaggtatatccgcatattatcatgatgcagccgcagctttgataaaagatggcgagatcatagctgccgcacaagaagaacgctttacccgaatcaagaacgatgcatcttttcctgcaaatgcaatccgttattgtttacagcaagcgggaattttattgtgtgatatctccacaattatctattacgaaaaaccctatctgaaatttgagcgaattttagaaatcttttatcgatacgcaccatggggggtggaacagttcattaaaggaataccaatatggattgaagaaaaacttttttgcaaacgaatgctcaagcgtgaattacacaagttaggaaaattcgatgaacaacattgtaaacttttgttctcggaacatcatttgtcacatgcggcttccgcatttttcggttcagattttcaagaagctgcgattataacagtagacggtgtaggagaatggaatacactatctatcgctcatgggaaagccaatcaaattcaattaataaaagaaatgcgatttcctgattctattggattgttctattctgcatttacctattatttaggattcaaggtgaactccggggaatataagatgatgggattagccccttacgccgatcgatctgaccgacaaacctcaaaatttgtcgatcagatcaaacaacatctactgacgatccatcccgatggttctatatcattgaatatgtattatttctccttccacaaaaaaatgcgaatggttcatgaaaagcgttgggaacaattatttcaattgaaacctcgaaaggcagaaagcgaaatacgcccagaacacgcaagtctagcacttgcagctcaaatcgtattggaagagatactattgagaattgttcaaacagcccaaaagctcactggctgttccaacctatgtctagccggaggagtcgctctaaattgcgtagcaaatggtaaaatcattcgttcacaattatttgagcatgtcttcatccaacctgccgcaggagatgcaggaggagcattaggagcggcttgggccacttattatatttaccaaggacattcacgaaaagccgggatgaacggagacaagatgcacttcgcccaaaccggtcctcaatatacagagcatgagattcaagattttttggactcgaataacatttcttatcactatttggatgaagcatttttatatgaagaagtggctaaacacatagcttccggtttatgtataggttggtttcaagggcgtatggagtttggcccacgtgcattaggaaaccgaagtatcttagcagatccccgtgataaagagatgcaaaaaagattaaatttgaaaatcaagttcagagaaagcttccgaccatttgctccagttatattaaaagaaaaagtcggcgattattttgaaaagctgaacgaatccaattatatgctgataacaaccaacatttctctgaaacatcggataccattgccaaagcattatcaagatttagatgccgcagaacgattggcgttaccaaaatcagatattccggcagttacccatgtggatttttccgcgcgcgtacaaactgttgatgaacaaagtaatcccaaattaacgaagcttttacgggcattcgaacaattaacaggctaccctttgcttatcaatacaagttttaacgtacgtggcgaacctattgtctgcaccccgcaagatgcataccgttgttttatgacaaccaacttagatctcttggttttagggaattatataatcaataaaaataacatacaaaaatcatagaatatggacacattgaaagacttactactttttataaaagaacgaaaaaaatggtggttgctacctgtattaatattcttgctattgattggcttgttgctaatctctacaagtaatacagtgattgccccctttatttacactctattttgaatgtcctatgaattggattcacatatacaagaaaatacgtacggtttggattcgtttcggaaacctgttaaacaagatcacctcaccaatcctgttgggaattacttattttttgatcctcacgccaattgcgtggttataccgcctgttcaaccggacagaagaggaacaagatagtacaatgaacgaacgagttaagacttattctaaagaagattttattcatccatggtaaatatgaaacaacttcatacattttcctacgggctactaccattcgtcctatttacagtaatcctttatgcctttttctataatcatcatctgctctttgccgagcagttacgattgtttgaatggaacaaagactatttcaacgaaatagtttataatccaggaggattatctgcctatataggggagtttttcacacagttttatcatttaaatcattttgggggatggattttaggagccggagtcggactaaccggtatattatatcgcaacctgatctgccattggaaaattggaggaaatgtctcatgggaactgattcctatcacttcactggttttcttctatttaaaccctaacgcatcattgggactcatttttggacttctgattacccttttacttgcaagaataactcttcatgaaaaggaaggcaaacgcaaaagacttctgatcctaatcaacttaccgatttgctatttctttactggaataggctgttatttatatcttattctcatcttcctcgatgaaattttttcgaagaaaaaacactcatttcttgcttggattctatatacactcgttacaatcctactgcctatcttaacttattataaattcgacatcaatgaaacacaagcttggataggtatagcttgttttattacacaagacttacttcatccacttggtatcgttatcgcttcatttttaatgtctcccttattagcttacgggacatatcatcttttacagcgattaacagacaaaaaacgattcgctttaaatctgctcatggctttcttcgctatcgggatcatcttaagccaactcaaaaatgaggatgaacgactttatcaactacattatctaatcacccacgaaaaatgggacgaagcgattaccttcatgcaaaaaaagcctgtccaaaatgttctgatgtcctcctataccaacattgccctgcttcatcagcaacgtctttcaaaagagctattctcgtatttccaagtagctcatgtcaacgaattttggtcttccaaccatctattaaattatctgactgctgagacttattttcagctagatatgctctatgctgccagagcctatatgttcatggcgaacacgcaaactccatccggacgttccccgctctatctgacacgattggcggagatcgaatacagaaggggaaaacgggctgccagcctcaaatatgtggccttactggagtctaccttattctacaaagactgggcttacaaatttaggcaaaagatgaacacagactcctcgacaaaaaagagtcaactttcacccaaaaccaataagctttttcttgccaaagagatgcttttcaacgtggaacaatttgagacacaagcaggagccaacaatcaaaaagtcatcgatttcctgctagcaaaatatatgctcaacaatcaatataacgcatttatccaattagccgcccggactcatctcacaatacatagtagcaagcattatcaagagtttttgctaatgtatgcttatctactgaaagataactcattgatttcaaaatggcaaattgaacaaactgtaatagagcgtttctaccgatatttacaaatcaaccagtcgggaaaatctccggaagaaatccaggaattactatgcccctataaagacacctattggtattacgtacaatataataaaaaacaaacatgagacttaacattttttacatacttctaatcgccttatgtggcctctatggatgcaaaaatcatcaacaaccaatcattaaagaaaatcttaacatactcccaacaatttatccggagtatcaaggtgctcttttgcccgtcaatattgctcctttgaattttaagatacaagatgagggtgatgaatggatgatccagattcaagggaaaggaaatccgatcacgattacggcgcatgacgcagtagagattccgattaaacgctggcgacaattacttcatcaaaatcaaggagggagcttaagtatcaccgtatccagtcgacaaaaaggagaatggtatcaatattctcctttcacgtgggatatatccactgattccattgatagtcacttagcctatcgtttaatagaaccgacctatgcgaattggaacagtatggccatttgtcaacgtgaactatcttctttcaaggaaacggaaatcatatcaaacaaaaaaagcgggcagaactgcatcaattgtcatacctttaaccaaggaaacccgaatgaaatggtcatgcacatgcgcaaaataaatgcgggaacgattctgatacaaggaggagcatgtcaaaaactcaacacaaagactcctcatacgatttccaatttcgtttatccggattggcatccttctggcaaacagattgcattctctacaaacctaacccaaatgtctttctacgatgcacaccctaaaatcatcgaagtatacgatacgcaatccgatatagttttgtatgatatttccaaaaacgaagtctataccagtccccttttagccaatgcaaacaaactagaaaattttccattcttttcaccagatgggaaacagctctatttttgtacgtgtgaccggatagatagtttgcctcaacaattctctaatataaaatatcgtatctgtagtattggttttgatccccaaaataatcaattcagcaagcaggtagacactctcattgacttaacaaatgcaggtaaaagcgtaaccctcccctgcatttcacctgatggacagtttattgcctgttctgccgcccctcatgggtgcttctccagctggatccccgaatcagatctctatctatataacacaaaaactaagaaattgatagctgcgactgagtggaatagcccggaagcagaaagctgtacaacatggtcctctaacagccgttgggttatcttcagcagccgacgggaggatggcatttataaccgactctatatcgctcatatcgattctgtaggaaacttaagcaaacctttcctacttccacagagagatcctacttacaaccaacgcaacctaaaggcttataatctgccccgccttatcaaaggcaaagtgacgatttcaccaattacaattgggagatgtgctgaagcaaaaggcaaaaaatcggtccgatttagcaaacattcttataaaccgcttatcaacgaagcgacagagaatcacagtgaaatcaattaaggtaacacagataggaataactaaacgattttcaacataatttgtgtttggcagcaagtgcctgtgaaggtccttgctgttttttctgccggactaaaacaaaagtttgtttcttgttaaacctttttgcacctaattcgtctataatttcgcgtacttgtgtatatttacgtgtcgataagtgtttttaagtagaataccagaaaaatatgacgaagagagtgaagtggagcgtgacggccgcaattgttttgatgattgccggaatgatcgcttacccgcagattaaaagccgtatgaaggcatccaaagatgcagccgaagtggttccgccagccggaagccaagttcggaaacaagttttgaacattaacgcggaagtgctgaaatatcagtcccttaccgacaagaccattgtaaccggcagtacgatcccggatgaggaggtagacctctcgttcgaatcgtcgggcaagatcatggccatctattttacggaaggtacgcatgtgaaagccggtgacctgcttgccaagatcaatgacaaaccgttacaggcggaactgaagaagttggaagcgcaagtgcctttagccaaagatcgcgtgtaccgccaacatacgcttttggaaaaggacgcggtcagtcaggaggcttatgaacaagtggctaccgaatatgaaaagctgatggcggacatcgaactggtaaaagccaatattgcccagaccgagctccgggcgccgttcgacgggattatcggccttcgtaatgtcagcgaaggagcctatgcttccccctcgacagttatcaccaagctgacaaaaatatctcccttgaaaatcgagttctccgttcctgaacgctactctgccgacatcaaggacggtacgccgatcgtattcaaaatgaacacgtccgtcggcatgatgcaagactacaaagcgaccgtttatgcagtagaaagcaagatcgacgaggcaacccgctcgctgaaagtgcgtgcaacctatccgaaccgggacgagtcgatcgtgccgggacgctatacatctgtcgaaattacccgccgtgacataaaagacgcattggcgatccccagcgaggcactgatcccggaaatgggaaagaacatcgtctacctgtataagaatggcgtggccgaacctgccgaaattatcttaggactccgcacggaaagccaggtccaggtattgaaagggctgagcgtaggtgatacggtgattacttccggcgtgatgcagcttcggacgggaatgaaagtgtcgattgataacctgaagtaacgaagcaacatggcgaatatttccgaaataagcataaagagaccggtactctcgaccgtgatgacgatcatccttctgttgttcgggatgatcggttataagttcttaggggtccgtgagtttccgagtgtggacaacccgatcatttcggtcaacgtaacctatccgggagccaatgccgaagtaatcatgaaccagattacggaaccgctcgaacagaatatcaacggcattcccggcattcgttcgctgagcagcgtcagcagtcagggaagttgccgtatcacggtagagtttgaactgtctgtcgacctggaaacggcggccaacgacgtgcgcgacaaagtttcgcgtgcccagcgttacctgccgcgcgactgcgaccctccgacggtatcgaaagcggatgccgatgctaccccgatcatgcagatcggtatccgaagcagcaaacgctcgttgatggaactgagtgaaattgccgaactgacagtgaaggaacggcttcagaccattccgaacgtgagtggcgtggacatctggggacagaaacgctactccatgcgcctgtggctggacccgatcaaaatggccggctacggagttactccgttggatgtgaagaacgcagtggacgccgaaaacgtcgagcttccttccgggagcattgaaggaaacacgatcgacttgtctatccgtacgttaggactgatgcacacggcaacggaattcaatgatttgatcatcaagcgtgacggcgacaacatcatccgcttccaagacgtagggcgagccgaggtgagcccggaagacttgcgaagcgtgatgcgcaagaacggcgaaccgatggttatcgacgtcatcatcccgcagccgggcgccaaccagatcgaaattgccgatgaggcatacaaacgtatcgagcaattgaagaaagacctgccggaagacgtaacggtcgaaatggtgtacgacaatacacgctttatccgggcctccatcgcggaggtcgaagaaaccatctatgtggcattcctgctcgtggtgctgatcatcttcctgttcctgcgcgactggcgcgtgacgcttgtcccggtggtcgttatccccgtatcattggtcggggcattctttgtgatgtatgtctccggcttctccatcaatgtgctgacaatgttggcggtggtgctctcggtcggactggtggtggacgacgcgatcgtgatggcggagaacatctacgtccgcatcgagcagggaatggaaccgaaagaggccggtatagacggggcgcaagagatattcttcgccgtcgtgtctacgacggtaacactcgtgtccgtgttcctcccgattgtctttatggaaggcatgacgggacgcttgttcaaggagttcagtatcgtgatcgccggttccgtaacgatatcttcctttgtagctttgacctttacgccgatgttggcgaccaagctgctgagaaaacgcgaaaacaaaggctggttgtacacaaagacggaaccgttcttcgaaggcatgaacaatatctatgcaaagtcgctgaacgcattcctgaaccacaagtggtggtccataccgattgtcgtgatccttttcggctccatcggctatttctggcgaaccatccgctccgaactttctccattggaagaccgttcatccatttcgatcaatatacgtgcacaggaaggagctaccttcgagttcatccgcgactttacggaccaagtggccgccatggccgacacgttggctcccgagcggcaagccctaacggttcgtgcgaataacagcaacggatacatcaccgttttacttcccgacatcaaagatcgcgaacgttcgcagatggagattgccgatgtgctgtcaaagaatgtacggggcaagacagaagcacgtgctttcgtccagcagcaatccactttcggaggacgtcgcgcaggtatgcccgttcaatatgttttacaagcgaccagcctggagaagctacaggagtatttgcccgcctttatgcagaaggtaagcgaaagcccggtgttccagatggcagacgtgaacctgaagtttacgaaacccgaagcccgtatcgagatcaaccgcgacaaagcttcttcattgggcgtcagcacccgcacgattgcccagacactacaatatgcattgagcggccagcgtatgggatatttttacatgaacgggaaacagtatcagatattgggcgaaatcaaccgccagcagcgcaacacgccgttggacctgaaatccatttatgtccgcagcgatgcaggagagatgatccaactggacaacctcgtcacgttgaaagaagacgttgcccctcctcagctgtaccgttacaaccgctttgtgtcggcaacggtttccagcggactcaacaaaggttatacgatcggtgacggcctggacgaaatggaccgtatcgcctcggagacgttggacaacagtttccgtacggccctgtcgggcgaatcgaaagagttccgtgaaagttcgtccagcctgatgtttgccatgatcctcgcactgttcatgatctatctggtcctggccgcgcagttcgagagtttcaaagacccgttggtcgtgatgttcacggttcccttagctattgcaggggcgttgatctttatgagctattcagatataaccatgaatatattcagtcagatcggtatcatcatgctgatcggtctggtggcgaaaaacggtattttgatcgtagagtttgccaaccagcgccaggaagcgggactgagcatggcggaagcgatccgctcggcttccacacaacgtctgcggccgatcctgatgaccagtatttcgacgatcttaggattggttccgctcgtatatgcttcgggcgaaggggcacaaggacgtatcgcgatgggtatcgccgtagtgggcggtatgatcgtttcgacattccttaccctgtttatcgtcccggcgatgtacagctttatttccacggacagacaatcgaaaattaataatcaagaattaaaaattaagaaataaggcaattgaggatgaagaggtttcttttattaatatgtatagcatttacggtcgtcccggccgaggcgcaacgggtgttcagcctggacgactgcatccagaccggattggaacgcaattattccatccgcatcatccgtaacgaacagcagatcagcgacaacaacgccactcccggcaatgccggctacctgccgaccgtcgacctgagcagtggttttagcggcacgcttaacaataacaataacaagttgtccgacggaacgacagaaaaaacgaacggcatccacaacgagacggcagacatcggcctgaatgtgaactggaccgtcttcgacggattaggcatacaggccacttacgaaaaactgaaagagttacagaacttgggagaattgaacacccgaatgacaatcgaggatttcgttgccgacctttcgagcgaatactacaacctgatccgccagaagatccgcctccgcaacctccgctccacgctcgaactgtcccgcgaacgtctgcgtatcgtggaagagcggtattatatcggctcgatgtcccgcctggacctccaacaagcgcaagtcgacttcaatgccgacagctccaacgtcctgaaccagttggaacaagtgcatacttcacgtatccgcctgaaccggctgatggcattggaggatgtggaggaacaagtactgatcaaggactccctgattacccccaacccgtttttagatgaagtggaactatggaaaagcacgcttacctccaattcatctctgctgatcgccaagaagaaccaggtgatttccgagttggactacaaaaagatcaagagccgtaactatccgtatgtcaaattgaatgccggatacggctacacggcgaactggtacgaggtaggaacgaccgacctccagcgccgcctcggcctcaactatggggtgacggtcggcatcaacgtattcgacggtttcaaccggaaacgcgaacaacggaatgcccggatacagattcagaaccaagaattgcgcacacaagaactcgaactgggattgcgggccgatatgagcaacttctggatggcttatcgcaacaacctggacttgtggagcctggaaaaagagaacttggtcgcggcacaggaaaactaccggattgcgatcgaccgctataaactgggcgacctgtccggtatcgaattgcgtgaagcccagaacagcctgctcgaagcggaagagcgccagtccatcgccgaatactccaccaagatatgcgaaatctcccttttgcagcttagcggaaagatcatggatatgttccatgaaaatgattaactttgcagagttaacgatttatgattttagatttatgatcgaggttcacaaatcataaatctaaaatcataaatctaaaatcataaatcatgcgcattatccccaaagctaatacactaagaaaaggcatacttttatacagaggcatccgttaccgcaaaggcttcggggttcattccccctttgtcttcaacctaatcacgaaagtgattgaggagcgttgccaatactatagcttctacgacatcgaactgatccgcaagcagctgcttttccaagatgacgagatcacttatcccgaccgccagcaaaaggggaagatgcgccgccgcacgatcggccggattgtcgaacgcgaagcgatacggcccaagcacggcgccttacttttccgtcttgccaactatttcaaatcaaaacacatccttcagttcggcccttccatgggcctgtccactttgtatctgacttcatatgcatccgatctgaaatgtatcgctctggaaaacgtaccggagtttgcctccatcgcccgtatcgctttcggcaaagccgcccgtaacccggtcgacctgcgtgtcggaagctacaaagatttactaccgaaagccttgaaagacatggagcaactcgattttgtctttttcaacaccctgtatgagcagcaaaacaatagctggctgtttgaggaatgcttgaaacatgtgcacggcgatacggtctttgttttcgaaggcatcaaaaccagccgcaaaatgcgcgaattctggcgggaagtatgctgtcatcccgaagtaacggtgacgatcgacctgtattcaatgggaatcgtgtttttcaacaagaagttacacaagagggattatatcgtctatttctgactctttatccaaagatacaaacaaattgatttttgacttatacatccgtctatcacctcatcgactgcaatgctcgatttgatctgtgaccgtgataataataggaaacaataacaaatatgcaaataaaaatatacagaccatacgctaacttgaataaaagtattatagagtgatagaggccatacttctagctttaaactataaggtcatagagtttttgacctaagtcgaataccttttcgaccttagtgaaaaaggttttcgaccataggcaaaaaggtatttgacttaggccgaaaataaaaaaggatataggacaaaacgtaaatatctatatattagcacacaaaagttttccgcaatttcctcatttatcacttaaatatgtcgctttgggtacaaggacgagggggaggaactataatcaagctggatcaagacgagacattggtaaagatgcctgcaattttttctttcccatcaaaataaataatccgaatccttgcacaaatcccggaatctgacgaatattgtactcctttttgcaacatctggcaaggatgtgcgattatataataaaacgataagttattgtcatatgaaaaagagcattatatacacagggaccggcgacaagggaaccacttccttagttggcggcgaacgggtatcgaaagcgcaccaacgtatcgaaagctatggtacggtcgacgaactgaactcgtttatcgggttgttgatcacttcgcttgaagagaaagcggatcaggacttcctgctgtttatccagcacaagttgtttacgatcggttcctatctggcaaccgatcaggaaaacacggaactgaaagtagaaagtaaggtgatgccggaaacgatcacccgtatcgagcgggaaatagaccgcctggataacgaactgcccaagatgcgcaactttattttgccgggaggaagccgcccggcctctttggcacatgtgtgccggacagtctgccgacgggccgaacgccagatctaccgtttggcagagacaattccggttgaagaacctgtcctggtttttataaacagattgtctgattatctgtttgttctggcacgtaaggaatgcatacggaataatggcaaagaaattatctgggattatacttgcatctaaagaatattgttttatttttgcggaaaatttgagaacctgaccgccgtaaggtggttattaatacttgacagctatgtattggacattagagttagcttcaaaactggaagacgcaccctggcctgcaaccaaggatgaactgattgactatgcacaacgttctggtgcgccactggaagtgattgaaaatttgcaggaaatggaagacgaaggtgagatttatgaatgcatggaagatatctggcccgactatccaagtaaagaagactttttcttcaacgaagaagaatattaatgtgcgataaaaacgtacaggcatgaaataataacgaggtggcagggctatgtcccgccgcctcgtttgctttttatacaatttattcggatttattccgtttcttgatatatgaacaaatatctcctgcttattatccttttggtaaccggcctcacgggagcgcgggcgcaatacgactcgcagctaagccagtattttatggcgctgggttactataatccggcgtatgcgggtgttacgggagatttgaacatgttggcgctgtctcgtttgcaatatgtcgggatcgacggggcgccgacctcctttttcatcaatgcggatatgccactgaagatcgggaaaaccaatcatggcatcgggatggtcgtctttaccgaagggatcgggcttttcgtcaacacacatgtcaatttgcagtatgcctataaacaaaaactgtttggcggtacgctcagtatcggaatgcagttcggaatggtaaaccagtcgtttgacggagaaaaggtcttttatccgaccagccagttccaccaacaggaagaccaggcaattccaaagacgcaggtgagcggaatgggcttcgacttgaacgccgggctttactatcaccgcaagaacctctatgccggtttgggcgtcacgcacttgaacaagacggagatcatattggacgaatattcttccatgtatctcgccagcacatataatttgatagccggatacaatattcagtttcgaaatccgttgtatgaattacagccgtctgtattcctgaaaacagacatgcagagcttccaggcggacataaccgcccggctgttttataataagatgtttaacggaggtttttcctggcgtgtgaatgagtcgctgatcctgttgttaggagccaagatcgggagttttcaggtaggatatgcgtatgattttccgatctctaccatacccatcttgaaagccacgagtggaagccacgagttggtagtgagctacaagttgaagttgaaaaaatcgaagtcaggaaagaatagacataaaagtgtacgtatattatagtatatgaaaaaagtattgttagtacttgcggcagtagccctgtttacctcatgtggcaaaaccctttccggtggcgggggcgaagtgacaggggtacgatcggtggcgtttaacgaacctgccccttacgggatggttctgatcaaaagaggctcattcgagatgggacccgcagataaggattccttgtgggggatcaatcctgaaacgaaaggcgtctctttcgatgctttctggatggacgagacagaggtgacgaatgccaaataccgtcagttcgtgtattgggtgcgcgattccattatccgcgaacgtctggccgacccggcttatggcggcaatgacctgtttaagattactgaagataaatatggcgaaccggtgactccgcatctggactggagccgcccgattccttggaaacgtgccaatgaagacgagatacgggcaatcgaaagtgtctacaccgtaaatccggtgaccggcgaaaagacgttggacccgaaacagatggtctatcgctacgaatggtacgactatacgtcagcagcccttcgcaaacacaacctggacccggcagcccgcgtgcgtaacaccgatatccaggtcgaccctgacgaagtgatcatgatatccaaagacacggcctacatcaccgaggaaggcgagatcgtgaacgaaaccatcacacgacggctcagcgggccgtgggatttcctccacacccgtatcgtgaatatctatccggacgaaagttgctgggtgaacgatttcaacaatgcttacaacgaaccttatatgcgtatgtatttctcgcatccgggctatgacgattatcctgtggtaggcgtttcctgggaacaggcgacagcattctgcgtatggcgcaccaacctgttcaaggaatctctgaacttccccagcggacaggctctcgaaccgttccgcctgccgaccgaaggcgaatgggaatatgcggcccgtacaggcaagaacgaaaacaaatatccgtgggcaggcgacgagctggtgagcggaaaaggttgcttcttgggcaacttcaaaccgggcaaaggtaactatacggaagacggccatctgatcacttcgcgtgtcggctctttcgctccgaacgaattcggcctctatgacatggccggcaacgtggcggaatggacatcgacttcttattccgaatccggaccgagccagatgagcgacatgaatccggatctgcgctacaatgccgcgaaggaagacccgtatgccatgaagaagaaggtcgtacgcggcggttcctggaaagacgtggcacagttcatccgttcggatatgcgcaccttcgaataccagaacgaaacgcgttcatacatcggtttccgttgcgcccgtacacaaatcggtttttcgagagcaaaaggtaaaaaataacgcaggggcggagttcgcccgccctctctaattaacgaatatacattatatcatgggaaaatatagaagatataaaaacagagtagaaatgtacctcgccagtgaaaaaggcaagcgggtactgaatttctgttatagctggggagcctccatcgttattataggcgccttgttcaagttgttacacttgccgtatggtaaccaaatcctgtttgtggccatgacggtagaagcattggtattctttatctccgcttttgaaaagccattcaacgaatatcactgggaagaagtgttcccggttttgaaatcgaagaacccgctcgaccgtccggatttcgccaacacgcctatgtccaatctggtcaattcgcctgagaatacgaccgacgacgaggttgctggcggattgaatatcaacttaggcggcaagcaggctaccggactgggcaatctcggcctggatgtgagcgaagaagatacgaaaaacctttccgacagtatcaagaaactgagcgccgccgccgaacagatctccaagatggcggaactgacggaagcgacgcagaaatatctggaacagctttcgggtatgtccgagaatatggaacgtttcagccaggtgacgcattcgctgaccgacgtttccgacacacttttgaattcgtataagagcattacggataattcggatggcatcaaccagaattcccgcggttacgtgcagcagatggaaatgctgaaccgcaacatctccggcttgaacacgatctacgaaatacagttgaagagcatcagctcgcagatcgaatcgatcgaacatatcaacagtggcttgagccgcattcgcgaaatgtatgacggctccgttgtcgacagttccgtgttccgcaacgaaacggaaaagatgacgcgacagttggccgaattgaaccaggtatacagccgcctgttgcaggctatgacggtcaatatgggataccagcaaccggcgcagcccgcacaacctgtttaccagcagcaaccgcagcccgcacagcagcagaattaccagcaggcctatcagcaaccgtacggatatcagcagcaggctccgtatacaaacaacccaatgaagtaatcggatatggcaggaatagcaaataatcccaattcgccccgtcagaagatgatcaacctgatgtatctggtgttcatcgccatgatggcactcaacgtgtcgtcggaggtactcgacggtttcgaactggtggaaggcagcttgcgtacttctatcgataatacctcgacccgtaatgagatcgttacagaggaactgaaggcttattatcagacaaatcccgaaaaagtacgtgaatggtacgaaaaggggacaaaggtgaaggaggcatccgacagcctgtacaattacgtgcaggatctgaaagtgcgtatcgcgcagattgccgatggtaaggatgccgatgtcaataatatcgatcataaggacgacctcgaagcggcttcccgcgtgatgctgtctcccgtttcgggcgaaggcaagaaattgcgccagagcatcgaaaaataccggacactgatgggcgagatggtggaagactcggccaagacgcgcatcatcgaagccagcctgtcgacaacgccgcctcacaaggccggtatcaatacccgcacttgggaagaggctttgttcgagaatatgccggtggcggcggctgttaccttgctgacgaaattgcaaagcgatatccgctatgccgaaggtgaagtgttgtccaacctgctgagcagcgtcgacatgcgcgactatcgtgtgaaccagatcacggcacaggtgattccggaaagccagatcgtcatgcgcggcagccagtacaaggccaatatcgtcttatcggctgtcgactcgacgaaacgtccgaccgtctatgtgaacggcaaggaattgccttatgatgcaaacggcatgtttacggctgtagccggtactccgggcacttatccggtcaaaggatatatcgaaatgccgggcagcgacggcagcgtgatgcgccgcgagttcgaaagcgaatacttcgtgacggaaccgagtgcgacggtagcgccgatgctgatgaatgtgttgtatgccggaatcgccaacccgatccgtatcgccgtgccgggtgtgcccagcggcaacgtgacggcaacgatgacgaacgggacactggtccgcaaaggcgaccaatgggaagcccgtccgacaacggttggaacggatgccatcatttccgtccatgctaaaatggcggatgggcgcagcgtcgagatggcgaaaacgactttccgcgtacgtgccctgcccgacccgatgccttttatcgaatataaggaccagaacggcaatatgcgcaagttccgtggcggtcagttctccaaacgcaatttggtggaagccgacggcatccaggcggctatcgacgacgacctgctgaacgtgccgttcaaggtgttgagtttcgagctgactttctacgattcgatgggcaacattattccggaagtcacgcaaggcaaccagttctcgcagcgtcagaaagattatatccgccgtctggcaagaggcaaacgcttctacatcacccatgtgaaagtattaggtccggacaataaggaacgtatcattccgaccgtcgaagtaatcgtcaattaacataacgtagggacgaggtctgctcgtcccgtaatgtataaagatatatgaaacgtttatattacatagcaaccctcgccatcgccctgttcgcctccctccccatacaggcacaggaagaggccggcaatacacagcaacagcagcagagacgtcgcggtcccgaagcaagccgtggcgcccgtgaagaagagaagaaagagaacggcatgcccgaactgaccgtccgagcacaggatatgaacgagcgaatgacgcagcatatcggcaacgctcgctggatgcgtgtcatctaccgccagatcgaccttacgaaagaacagaatgctcctctatactatcccacccaaccgatgaacgggcagatgaacttgttctcgatcatcttccagctggtatgcgaaggcaagttgtccgcctatgaatacctggacggttacgaggatttcagcgacaaccgcaagctcgacttgaaagtcatgctggatcgttgccgtatcttctacgaagagacgccaggcaaagacaacgaacctgccggtttcgtcgtgaacgaaagcgatattccttccggcgatgtccgctcctattacataaaggaagcgtggtatttcgaccagaacaactccgtattcgatgtcaagacattggcgatctgtccgattctgacaatcgtggacgatatgggacagaacaccatgccaatgttctggattccttatgaaaatttgcgtccctatatcaataccgcctatatcatgacgtccaacatcaacaacgccatgactttcacgctcgacgactatttccgtcgccggatgttccagggcgatatcttcaagacgcagaacctgatgaaccaacctctgcaagcctactgcccgacacccgattcgatgaaacgcgagcaggaacgtatcgagaaccagctgattactttcgaaaaatccctctatctgcaaccggacacagctcagttggcagctgatacaaaaggcaagaaatctaaaaacgcaaccgtttccgcccgtggcagaaagacggaagccgcaaaagagagcaaacaaaaagaggtcaaaatcaaagctccaaaagcccagaaaagcgctccggtccgcagcgtacgccgtcgccggtaattacctctacaatatccaaaacataaaagaggcgtagattagtgatgacttgaatgacatctgctaatctacgcctcttttatgtttcgtcgaagagggttacagcttatgtatcaccttcatcaactgatctcccaagccgattgtgtagccttgtgaaacgaacactacacggttgaaagtgtcggcaatgatgaagattggcagtgtgttggcgttctgcaacttcatggctgcggcgatctccttctgaattgttttgtcgatatctatgccgtatgtgatggtagttggcaactctccgaactccttcggatcgaagttctggaagcccttttcatcggggaacaacaaaaccatgccgcggccccattcttcaaggtccttctttacggcagcgatgtcacgcatggcgtggttggtcggctcctggcgcgctccgaggacagcgacaacataatagccgcggccggtggtagccaacagactcgtttcctcgccgttatcagcccgtttgaatttgttttcggagttgaagttgccgatgacttgtacatcgtcctggctctcacgcatctccagtttgatatcactcgtcttgcctggttctacgttgaagaaagacatttcggccagtacgctaccgtttgccatacgtgttccggttaccagcatataatggccctcatccatagaaagcggctttttcaacagagcactccaagtatcaccgccccccatatccacatcgcccgattcgaagttaagtgtctgcaacttgccggtcggcaacactttcgcaatcgtgaaatgactgtaatatttcgggtcctgcaatgctttgatcggctggtaagaagcgacgaccttaccttgcttggcaaccgtctgctcggcagcttcgaagtctacatccacccagttcagacctttcgcatattgcacttttcccgccactggttcgatacgtgcaggaataccgatgctacgacatacagcgacgaaaaatatatcgcgggaacctttatcggccacgcgcgatttccatacgcccatcggcataatcggaatgcgttgcggattcaggctgtcattgatactgatattttccttcacccagtctacaattaattgcggatcagctttagccttcttcactaatgccgaatcgacgttggcggcgaaaaacttcctgtacggcgtcaggaactcgtttgccacacgcggattgaggatatattcggtaaacagggaactttgcacagcctgggcattgttcagatggtccgctaacacggaggccggcgtatcacgcaagtccttggcagagataacattcagcaaatccatcgccatcggacgtttgtcggcaggcacatcgcgaaggaacttctcgatctcacgccagtttccccggctgccgatcatgaaatcggctgttttcagcgggtcgatacctaattctttggcaagtgcttccgctttctcttccgtataaaaagtgcccacatatttattacggatcacatcctcttcgtgcaaacgcttggcgttggcctctttctgttcgtccgtcacgcaggcggcaatggaaccgtctaccggaggaatgacatcaagcgtgacggtttcgatgtcacccggtttcttgtcgagagtgattgtcacgttattgtctttgccgaacgacaccttgctatatccgaacttaccgtccttagtcgcccataccagcatatcacctttaccggcggaaaggaatgccttcccttcagcatccgccttcttattggctacggaatagaactcggcatagttatatattttgaactcgacatcggctccggcagccggctggccgttttcatccacaatggtgatcgttgctttggccgtcggggcataattgtcgatcacgttgatctcggtgtaaccgtcggttacgtccatgacttcttccggtccgttgtatttgccgaatactttcgtgtgcatcagcataccacggtaagccggtccgttgaaccaccccaagttaagtaccggttccggttcacaggctccgaggaaataccatttaccgtttacccaagcttccacccaagcatggttgtcgtcggtatgcgcccaacgcggcgtatagacctgacgggccggtatgccgactgaacgaagggcggctacggtaaacgtcgactcttcgccacaacgcccgtaagcggtcttcacggatgccaaaggcgaactcgtccgggcatccgacggcgtatagatcactttctcgtggcaccaatggttcacttccagcacggcgtcatacaaggacaagcccttcacccggtctttcaattcttcataaaagaccatgcggctctcgtccagattctcgttgttgacccgcacgggaagtacgaaatggcggaagatgtcttccggtatgctgtctccccaaggcatttccacccgtgcacgaaacgaactgcggatattgtcgagatacagttgcccgtcataatccgtgatatctccgatcggcatataggcatacaagaaagtaagcgcctctttttcgtcggacgtcatcttttggttaaagactgaaaaaaggtttccgtccggcagagcggcctgctttgcccggaagtcattctccacttcggcgcggaacgtatcgtccgaaatgaaatgttgctgcctattgcacgaagttcccgcgaggagaacgaacaatagtaggaatagatttgttttaatcatagcgttaattttatcagcacaaatatagtgaatatatttattagtcagtagataaccttgtcttttaagtgttaagctgttgtgcatatcgttattttttctttactttgaagtgacaaagtatagagtaaaccgttattatcagcctatgttccacgaattacaaatcttcgagaatccggaagcaatcctgttggttgcttcgattatctttttcttcagtattattgccggtaaagccggtttccgtttcggccttcccgccttgcttctctttttaggtgtcggaatgctgttcggcagcgacggcttaggcattcagttcagcaatcccagtgcagcacagttcataggcatgttggcgttgagtatcatcctgttttccggtggtatggatactaaaatgtccgagatcaagccgatagccacggaaggagttgtccttgcaacagtgggagtattgctaacgacgcttataacgggaggttttatctattatgtgtttttgtggtctacaggttatgaaacgcttacggtagccgaatctatgctgatggcggcagtgatgtcgtctacagactctgcttccgtcttttccatccttaggagcaaaggggtttatttgaaacaacgcctgcgtccgaccctcgaattggagagcggtagcaacgacccgatggcatatatgcttaccttgcttattatcgcttatatacaggtcgggggtatgaacttgcaggaagctgtcctgcaattgctcgtccagctatccgtcggtgcgatagccggtttcctgttaggtaagctggccgttctgatgatcaacaagatcaatatggacaacgagtctttatatccgatcttattgttgacaactgctttcttcactttctcggcgactactttatgtaaagggaacggctatctggccgtgtacattgccggcctggtcgtggggaacgctaagattgtgcataaaaagagtatgggaactttcttcgacggttttgcctggctgtggcagatcgtcatgttcctcacgttaggtctgttggtgaacccgcacgagttgctgccagtcgctccagtaggccttttagtgggagtatttatgatactgatagctcgtccggcaacgattttcctgtgtttgcttccatttaaaaactttacaacaaaaggaaagctatatatctcgtgggtgggacttcgtggagcagttccgataatcttcgcaacttatccttggattgccggagtcgatcatggaggcatgatctttaatatcgtgtttttcatcacgatcctttccctattgatacaaggaacaaccgtaacacaggctgccaaatggctcggacttgtcgacgagccggagcgaaaagatgtgttcggtatcgaattgccggaagatattaagagtgccatgagtgaaatagacatcactcctgctgtcctttctcatggaaacaaattgatgcaactcaccttgcccgaccacacccttgccgttatggtgaaaagagacggacattatttcatcccgaaaggcaacacagagctgaaagaaaacgacaaacttttgatgatttccgataacgacgaggccttgttacaggcatacgattcgttaggggtgaaaaactatacgatgaaaaagaactgaaggattctcaatcagggctgcttcgatgctacaatggaatcacgtaacaccaacagcccttccggtcccatgttgaacagtaaatccacaatactcatattcggaagaaatccgtgcttgccctgaaaaacctgataatagggtttcggggagaaggacggatcttctccttcatgtttcggccggatgatctcacggaaatcgttcggcacttcggattggtattcttccgtataaataacattcggatgcaggtcaagcaggcgacagatcaactgacgcaattcctcattgtaatcgaataggaactcatattttttctcgtaaaaaggagcgaagtcctcttcgtaatattcgaaaaacggactcatattataagccgaaaccaaagcgttccaatgcaggtgacgccagttcccatgatcggagatacggatgtccttggtcggacacttcaacgtgtccggcttcacgatggggatagataaagctaacggaccgttggcggcggcaatggtacaacggttccggaaggtttgcttgaggtagttttcggctgtttccaagtgtacttccggatattggaacagtttgcaatattgctggaccggccccaaataggtagtagaaatataaacgggttgcatcattcagtttacgggtttaaagattcgttgtttgtcacggctgaaccagcataaccaggcatttccgatgatatggtcacgcggaacaaagcctaaatggcgggaatcgaccgattcgtttacattgtcggaaagcatccagtaataatcttgttcgaagaagaaaaacgcagtttcccttccatctaaatatagctttccgtcacgaaaaacagccttttctccggcctcggccaatatcgcttccttgcaagcgacaagggcagcttcatccaggcggtatgcccggcctttacggggaacaaccagcttgtacggagcagactgattccggataaaatgaatattcatctcttccgtcagttcttcacgcaattgatattcttcgaaagaagtcagggaaaaagaaaaaccgaacgtctcgctcttccagttccgcacaggtatgctcaacttttgcagcgctttcaggaaatcggcggcactcttctgggtaatgaaacaggtgttaagcgcacgaggagagtgaggtaacagcttcccgttcacctcatacccgtcgccactcaccaagatagtatccccaggcataccgatacaacggctcaataacaatggggtactcaccgtgtctttcaggagcggactggtaaacagcacgaccttgttccgtcccggatttccttcaaacggcaatttatttaccaagatataatcgccttgatgcaatgcatcttccatcgcactcgttgatatccggtaagattcgatacagaaacggcggacaggtataacaatgagaaaggcgataacaatcgttaccacccaactcacgtagaggcgacttttacgtccacccgccccgtttatgttattatgaatctttttccccatagaaatttgcttaatccgggtgtacccaacggaacatacggttccagcgaataccgccgtcaaacaagctacgatccttatccagtgacagccagatcatgatcggcttacctacgatatggtcttccggcacgaaaccccaggaacggctgtcggcactgttgtggcggttgtcacccatcatccaataataatcgtatttgaacgtataggtcgtttccggcttgccgttgatgtaaaccttactatcctttacttccaatttattatgttcataattgacgatacagcgtttataaagggctatattacgttccgtcaacgggatcgtggttcccttcttcgggatccatagtggtccgtaattgtcacgactccatccggtctggtagtcaaccggataataggaatcggttcctacgggatccggttcgagaaccacacgtttcacgactggaagttttttagctacttccaatgtcttttgagtcagcgggaaatggtaaatcgggttatactgcccgttggcattcggctgaatattcaacatagacatatattggggattatagcttccatcgatcaatacacggtcggctttgctgacatccagtaaacggaactgctcctcactcaacatggagccatccgtctcgacgaagtagttaagctgcatcttttccggattcttggctgcaacaccatcgatgtagacctggttgtcacgaatctcgatcgtgtcgcccggcataccgatacaccgtttgacataattctctcgtttatcaacagggcgatagatcacatcaccgaaatccgctttattcaacaggatggcttcccgtccgtattgttctaccaaatgataataatccggattctgaacttttagtgcaaccgtatcgccggcagggaagttgaacaccacaatatcattccgtttcacatgaccgaggcctttcacccgtttgtagtcccattccggccagtccaaatatgacttgcagttgaagaagggtaatgtgttttgtaccagtgggaaagcgaccggcgtattcggcacgcgcggtccatagctgagcttactcacaaacagatagtcacccactaacaaggacttctccagcgaggaactgggaatctggtaattctggaaaataaagatattgatgaaatagacggcaaccaatgcaaacaggatatcatccacccattccaacacattgcgtacctgcggattcttggtacgtttccaggctccccaagggatatacccggtcagaaaaatatcgacaaggacaatcaggcccaacaacaaccaggcattctgcatccaaagcgtgaaaagcaggtagagaacggctgctatgctgaatttaatccattgtttcttggaaaacttcttcatttgtttctgttattaattaaaatttaagcatatcatccattccgaggaaacctttctttccagcagtaaattcggcggcaataacagcgcccaaggcaaatccggcacgactcttcgcatcgtgcttgatgctgatcgtgtcgacatccgactcgtatgtgatttcgtggatacccggaacttctcctttacgaatggcatggataggtatatcggttgttttctcagccgtttccaaagtccagcggtctttacgatccacgttttcaatgattccttccgccagtgtgatagctgttccgctaggagcatccaatttatggatatggtgggtttccatcattttgatatcgtaagcggagaaattattcataatctttgccagatatttgttgatagcgaagaatatatttacaccgatgctgaaattggaggcatagaaaaaagttttaccctctttttcgcacatatctttgacttgcccaatcttgtcaagccatcctgtcgtaccggaaacaaccggaatgcctgctgcaaaacattgcatataattgttgaatgctgtagccggagtcgtaaactcgatcgcgacgtcagcactcttgaatttgtcggagtgtatttcttcagggttattgatatctacgatagacacgatttggtgtcctcttccaagtgctatctgctcgatagtttttcccatctttccgtaaccgataagtgcaatcttcatacttatatatttaactttcaattttaatttttcaactttcaactgataacgtgctgcaaatataaagaataatgcttagatttgggacataaatcttaactctgaaaaaagatggaacgtttattacattatgtttggaaatacaaactttacacggccacaccattgataacaacagagggacgtcccgtccaggtaatcgatcccggaatgcagaatacggatgcaggtcccgattttttcaatgcgaagatcaaaatagacggaacgctatgggtaggaagtgtcgaaattcatgataaatcttctgactggctgctccatcatcatgatacggataaggcatacgactgtgtaatccttcacattataggctttaatgatttccagccagttcgaacgaacggaaacccgattccacaaatgctcctgactgttccggaaaatattctccgcagtatagactggctgctttaccgggaggcggctcttccgtgcctcgatcacataaccgggatcgctcctttgcatatagcctgttggatggaagccttgctaagcgagcggctggaacggaaaacacatgacatattcctccttttggatgcgtatcagacagactggaatgaagttttttatattactttaacccgaaacttcggctttggtgtgaataatgatgcttttgaaaggctggcaaagagcttgccgcttcgttgcattcaaaaacagcggaacagccattcgcagatagaagcaatgcttttcggacaggcaggaatgttagaggaggaaaacgacgatcattactaccgcttgttgcaacgggaatacgattttttacgccataagttcggcctgtcaccaatggaagatttcgtatttaagaacctacggacacggcctgtcaactttccgtacctgaaagtggcacagttagccgcactttgggtacggtacgacactctgttttctgccattcttgaagccaggagcactggagagatcaaaaagtatttcaggattcctccatccggttattgggagacacattatcatttccggtatgcttctccccgaaaggaaaagaccataggcgaaaacgccctgaacatcctactgataaacacggtcgttccgatgctctttgcctacggcctacataacaaacgtcccgaatattgcgaacgtgctacccgccttttagaaagtattcctccggaaaagaacaccatcgtcaccaccttctacaacgccggtatcaccgtccgccacgctggcgacagccaggctttgatccaattaaaacgcgaatattgcgaaaagaagaaatgtttgtattgcaggatcgggttcaggatgttgaaaacgacaatcggacaaaagcccgtttaaatgcaaagattgattaatggcaggataccctactaattttcaccggatttttccctatttttgcacgtgtttgtcgaatgtatttgaaatagacataaatggatactaaatatatacgaaattcattccgcctgttgtatggaatgctgctgttgactgtcatttattcgtgtgccaatatcggtagtccgaacggaggaccctatgatgaaacacctcccaaattcgtaagcagtacaccggtcccaaatcagattaattatacaggtaaaaagatagaaatcctctttgacgagctgatccagatcgagaaaccttcggagaacgtgattatcactccgccccagatggaactaccggttatccgctctgccggaaagaaggcggtgatcgaattgaaagacacgttgaaacctaacacgacctacacgatcgacttcaccaattccatctccgacaataatgagaaaaacgtgttcgaaaacttctctttcgctttctctaccggagacatcatcgacacactcgaagtttcgggagtcttgctgaatgccgagaatctagaaccgatgccaggcattacgatcggcctgcacaacaatttggaagattccgcattcgtgaaactcccgttcgtccgtacttcccgtacgaatgacaaagggcagttcacgattcgtaatatcactcctggaacctatcatatttttgccttaaacgatgtgaaccgcgactataaattcgaccaacccggcgaagacatcgctttcttggattccgtcatcgtcccttccttcgaactgacgacccggcaggatacgacctggaaagacagcctgacgatcgatacgatccggacggtcggttacacccgtttcttcccggacaacatcgaactccgcctgttcaaggagaaattcgaacgccagtatatggtaaagcccgaacgcccggacgagaaatactttacgctgcgtttcaatacgaagctggacaccgtaccggtgcctgtccccatcaatttcaccccggaagacagtacctggtattttgtgcagcagacggaaggcggcgcggccgttaactactggcttgccgattcgaccgtctggaagcaggacactctgcaggtgcaggtctcctatccgaagagcgactccctgaacatcctgcgcccgcaaaccgacacggtccaactggtattgcgccgccgtccggcagaaaagaaaaagaagaaaaagaaagacgaacccgatccgatcgtgttcttaggcatgcaagtagacgctcccggttcgatggacttgttcgatacgatatccgtaaccttcaacgaaccggtattggatatcaacaaagagatgttcttcctcgaccaaaagatcgataccgtttggaatacggtcgatttcgacttcttccccgattcgactaacagcctgaactactttatcagacgtccgtggaagtatggggaagaatatcgcatcgaagtggactccgccgccattcacagcctttacgggaagtggaacgacttctttaccggtgagttcaaaatcaagaaagaagacgaatacggccatctctatctcaatatcaacggtgtggacacgactgctttcgtcgaattgctcagtagtggagacgcccctgtccgcaaagcgaaagtaaaagacggcggagtactctttatggacttgaagcccgataagtattatgcccgtatcgtgatcgacacaaacagcaacggagtgtgggataccggtaattatatcgaaaagcgacagcccgaagaagtttattattctcccaaaatgtacgagatcatgcagaactggcaggtcgaagagacatggaatgtcaactccaccccgctggctaagcaaaagcctcttgagataacgaagaataagccgaaggaagcaaccaagaagaaaagaaactacaaagatgaaagtcaacaatcatcgtcaaggaataatagcggcggcaacatgggaatgccgttctgacatcggccgcctgtggctgatatttttgctattgctatcggccgtgtgtgcgaaagcgcaggaaatcccggtccgccacaggttcagccccggcgaggaagtgcagtatgagttatacttcaaatggggccttctgatgccccgtgcaggccacgccaccctttccatccgcgacgcggaatacgagggcgagccgtcctatcactaccggctcatcttccgtacctccggcattatcgagaaggtctataagatgcgagatacgatcgattgccattttacccccgacatgctgcttctacggagtgagaagcgggtaaacgagaatgactattatctgatagacgacatccgtttctcctacgacaggaagaagatactcgctcattcccaccgttatacgcccacccgcacgaagatcgacacgatgctcgtgacggaagacccacacatgttcgacatgctgggagcaacgatgtatctgcgttccctggactgggacaagatgaaaagcggtgagagcttccctttccaagtggcgatcggacgcgaacgcatcaacatcagtttccgctataccggacagcagatcgttgaacggagcgagacgttgaagtacagaacccgccatttctatatcgacatctacgacgacgcctttacccaaagcaaggaagccgccgagatctggatcggcgacgacgagaaccatatcccgatcaagatacgcgccaagctgaagatcggtgcggccgaagtctattataagtcctccaaaggcttgcgctatccgctcacttcgcgggtagaaatcaagaaacggtaattcttaaggctttacaggtaaagaaaccgtgaagcaggtttcccggtaaggttgcgaagccaccgacaattctcctccatgcatccgtatgatctgccgggaaaggctcaacccaatgccgcttcccgtagccttggtggtgaagaaggggacgaagatatcttctatcaggtcggaagggacgccgggaccgttgtccgtcacccggataagcaattgattcttctccgtatcgacttccatacggatctttccatccgcctgcccttcgagtgcctgcatagcgttcttcagcaggttgatcaagacttgtgacagcagcttttcgtctgcatggaccgttatctccggctggaacagcacgagggagaaatcgatatgctgccgttgcatatccggcaagtacaaagtttgcaggttttgcagcagatacgtgagcgggaatggcttaggctccggctgcttcaggtaagcgaactgccggtacgattcggtgaaatgcatcagggtttgcccctggcttttgatggtgtccaatcctcgtatcgtcttgcggatggtggcatcggtgatctccccgctgcttttcggcgcgtctttcgtccggaaataagaaaggagcgtgccggagagggagacgaccggagcgatggagttcatgatttcgtgtgtcaggacatgcatcagcttatcccacgattcatattccttgcgatgcagttcgcggtcgaacgccttccgtctgttctcggtcatcaacatgtgtatgcggttgaaggcggcatgcaggcgacgctgttcccggcttccgatgtcttcggggaaatagagcatcgattcgtcgtcctcgatggcatccaggaaaagctgtatcctccggttcgaagcgttgagataatagacaaggagactgatcagccacgctgcgataaagagggccacgaaacccagtatgactgcccgccccgtaacgatgccggccacgcccaagcccgccaccagtacgatggcgaccacttgcaaaagaatgcgtatgtatagacgggcactgaacatatcggcgggggatcagaggttgaaacgcttcatcttattatacaaagtctgccggctcacgcccaactgctctgccgcagccgtcaggttcccttcattctgggtgatagccgccaagatcgcctgccgctccacctcttctaaattgggtacttcgctaaaagagagcgcctttcccggacgtataaagaggtcggaggcacgaatcacattcttttccgccaagatcaccgccttctcgatcgtatgctgcaattcccggatgttgccgggccagtcatagttcgcgagcttctccaacgcctgcggatgcaggattagccccggccgcccgtaaaggtctgtatattttttcaggaaataatcgacaaacagggcgatatcttcccgccggttccgaagaggcggaatctcgatctgtatcgtgttgatgcggtagaacaggtcttcgcggaaaagcgactgcgcgaccatctccggcaggttgcggttcgtggcggcaatcaggcgtatgtcgaccggaatcttccggttgcttccaaggcgggtgacctcgcggttctgcaaggctgccaggagcttggcctgcaatcctaacggcaggtttccgatctcgtcgagaaacagtgtgctcccgtgtgccgcctcgaacttccccggacggctctcgcgcgcatccgtaaaagcgcctcgttcatgcccgaacaactcgctttcgaacagcgactcgctgacggctcccatatccacgttgaccatctctcggccgctgcggagcgaaaggcggtgtatctcacgtgctagcatctccttacctgtaccgttctctccggtgatcaggacattggcgtctgtcttagctacttttgtcaccactttgatcagtttcatcatcacgggagaatgcccgataatcatagccggctcgctcgacctcgccactggatgcactagctgactggatttccgttcgcgcagggcggcacgtatcttcccgatcaggttatcgttgtcccagggcttcaatacgaaatcggcagccccacccttcaacgccctaactgccaactcgacatctccataggcagtcagcatgataacaggaagttccggtgcgatctcccgtatgcgacggagccagaaaagcccttcattaccggtattgactccggcagagaaattcatatccaacaggacaagatcaaccggccgactgtccaggaccgaaaggatactgttcgggttcgaggcagtctccaccccttcgaactcatcttccagaagcagttcgagagaggtcagtacgcttttgttatcatcaacgatcaggatagttccggcttgcataagatctttttccggtaaagttatccgcttccccgttaccttgcaagcgagcgtcaaaatatttgacacttttggattattattctgcacgaaccacttatcccttaccagacattcaccttccctctacgatcctctttccggctatatgggaagatcataaatgggtaaaactggcagagagaaagcgtaagtataatcctaaaacaggtttaacaatcgaggattatcataatctctagccaatcccctactcggaaatcgaacggaatgtatatgccacgatcgaacaaaatccgggatattaattcattttaaatctttaaagtgtccagatgaattgcatatctttgcatctggacacttttttgtataatcttaaaaataccatgtatatgcgcactatttcttatctgatctcattcttgttgctggccgcgtgcacgggaacaccctcaaaagcaccactcaccttgtggtacgacaagcctgcccaaaactgggacgaggcactccccatcgggaacggccgtgcgggagcaatggttttcggaggagttgagaaagaacaacttcaactgaatgaaaacacgttatacagcggggaaccgtcagtcgttttcaaagatgtgaaaataacaccggagatgttcgacaaagttgtcgggctgatgaaagccggaaaatacaagacagcttccgacctggtttgcaagaactggctgggacgcctgcaccaatattaccaaccgttcggagacctgcatatccaaaacaacaagccgggagatgctgccggatacaaacgggcattaaacatctcggatgcggttgccacaacagtctataaacaaaacggagtgaaatacgaacgggaagtattcgcttcccatccggacaacgtgatcgtcatgcatctgaaaagcgatacaccgaatggcatcgacatctcgctcgatttcacatcacctcatccgacagccctgcaaaaagggactgacgaccgtctgatcctgcacggacaggctcccggctatgtggaacggcgaacattcgagcaaatcgaacaatggggcgatcaatacaaacaccctgaactctacgatgcgaacggcaaacgcaagttcgacaaacggatgctttacggcgacgagatcgacgggaaaggtatgtttttcgaagcccagttgaaaccggtcttccctaaagacgggaaatgtgagattaccgacgctggtatccatatatacaacacggacgaagtctatttcatactcagtatggcaacaagtttcaatggtttcgacaaaagtccgagccgggatggtatcgatccttcggccaaagcagccagcattctggaaaaagccctttcctatgactatcagacactgaaacaacgccatacgaaagattaccgttcccttttcgaccgagtcgatttcgaactgttttcctctcccgaacaaaaggcgatgccgaccgacaaacgtctcgaacagtttgccggaaacgcagatcccgacttggcagctctcctgttccaattcggacgttacctgatgatcagcggatcacgtccaggcggacaagctttgaacttgcaaggaatctggaacaaagacacaattccagcctggaactgcggctatacgatcaatatcaatacagaaatgaactactggccggccgaactcaccaatctgtcggaatgccaggaacctcttttccgaatgatccgggaactgtctgtctccggtgccgaaacagcccggaatatgtataaccgccgtggttgggtggcccatcataacacatccatctggcgagagtccttgccgaacgacaacgtgccgacagcttctttctggccgatggtgcaagggtggttgtgcagccacttatgggaacactaccagttcacacaggatgaaacattcctgaaaaacgaggcctatccgttgatgaaaggggccgccgagttctttgccgactggctgatagacgatggcaacggtcatttggtgactccggtaggcgtctctccggaaaaccgcttcatcacggaagacggacaaacggcagccatgagtatgggaccgaccatggacatggccattatccgggaaacttttacccgcacgatcgccgcttcggaaatgttcaatctggatgaatcgtttcgcaatgaattgaaagataaattagcacgcctgttaccctatcaaatcggaaagcgtggacaactacaggaatggatatatgacttcaaggaatgggaacctcaacaccgccatttctcccacttgtacggtttccatccgagcgaccagatcacaccggacaaaacaccggaactgttcaatgcagtccgcaaaacactcgaactgcggggcgacttggcttccggctggtcgatgggctggaaaataaactgctgggcacgcttgttagacggcaaccacgcctacaagatcatcgccaacctgttcaatcctgtcggattcggaaacagtgcacatagaggaggagggctcttccgaaacttactgtgtgcacaccctcctttccaaatcgatggaaatttcggctatacggcaggtgtcgttgaaatgttattgcaaagccatgccggatacatccatctgttgcctgctttgcccgatgtatgggcagagggctctgtttccggcctgaaggcacggggcaacttcgagattacgatgaactggaagaatggaaaattgacagaagccaatatccattcgctgtcagggaaaagctgtacacttcgtgccagacaagcattcacggtcaaatcggacggtagaaccatagctacatccaccccggtccggtcaaacggtaaagaatatttccaagcgacattcgaaacgcaaaaagatggaacatatctaatcacacaataaacacgaagaaatgaaacaagcattatcattgatcggagtttcctttttatctgttgtcagttcactggcagcagataaaaagcccaatatcattctgattcttgccgacgacatgcgagcttcaggaatgaactttttaggaaaagaacaagtccaaacgcccaacctggataaattggcaggagaaagtacagtcttcaccaacgcccacatcatgggtggtacatccggagccgtcagtatgccaagtcgggccatgctaatgaccggaaaatatctttataacctcgaaaaacagggagcaacaatcccgaattcgcacacgatgataggtgaaacccttcagaaagccggctataatacattccataccggtaaatggcatagtagctatgaagccctgaaccgttgctttaaagaagggaaagccatctttttcggaggcatgtgggatcactggaatgttcccttgtacgattaccatgcagatatgaattacggaaaacgtcgtccggtcatccataaccaggcaaaatcgaacaaggtagaatatgatataggagaatatatgtattcaggaaagcattccgtagatattttcacccatgaagccgtcgaatatattcaacaacaaaaagataaaaaccagccgttcttcttgtcggtagcctatatgtctccccatgaccctcggagcatgccggatgaatacatgcagctttacgaccagagccaaatacaacttccacccaattttatggaaaagcacccgttcgataacggagaattagaaatacgtgacgaaatattggctgctattccccgccgtccggatgaaatcaaaaaacatatcagggaatactatgccatgatctcccatgtagacaaacgcgtaggcaacattatccaaactctgaaagataacgggttatatgaaaacacaatcatcatatttgcaggagacaacgggttggcagtcggacaacacggcctgatggggaaacagaatgtatacgaacatagcgtcggcgtccctttgatgatcaaagctgccgcacaacataccggtaaaaagaccgcagacctatgttacttgatagacgtattcccaaccctttgcgacatgctccaactacctgtaccccaatcggtagacggtatcagtctactttcttccttggatgggaaagagcctgtccgcgactacctatattacagctatatggataatcaacgcggcatttccgatggaacctggaagttgattgaatatcatgtgaatgggaaacgcacgacccagttattcaatctgaaaaacgatccttgggagaggaacgatctcagcggacaaaagaaatacgaaaaaacaatccagcgtcttcgcgaaaagatggctgaagagcagaagaggacaaatgatacatctgttttctggaataatttcagttattaattatgttttcgcgcacacttcatgtttatttaaaaataaacttctacttttgtggtctgaacacattataaaccatcgatatggataagaaagtaataacctttggagaaatcatgcttagactggccactccagactatctccgtttttgtcaaagtgataaattgaatgctacctttggtggcggtgaagctaatgttgccgtatcactggcaaactatggtattgcaaccgagtttgtaacccgtttacctaaaaacgacattgcgcgtgcttgcgtaatggacctgcgtaaatacggtgtagggacttctcacatcgtttacggcggcgaccgtttgggtatctattttctggaaacaggtgcggtagcccgtgccagcaaagtcgtctatgaccgcgctcactcggctatctccgaaatccaaccgggaatggtaaactgggaagaagtattcaaagatgcatcctggttccactggacaggcattacaccggccatttcacagggtgcggcagatgcttgcctcgaagctatccaagtggcaaaccgtatgggtatccccgtatcatgcgaccttaattaccgcaaaaatctgtggaaatatggcaaaacggcctctgaagtgatgccggaactggttgcaggttgtgacgtaatccttggtaacgaagaggatgcggaaaaggtattcggcattaaaccagaaggtttcgacgtaacagccacaaacggtgaagtaaacgctgccgaattcgaatccgtttgcacacaattgatggctaaattcccgcgtgcaaagaaggtgatcatcacactgcgcggcgctatcaatgcaaaccacaatacgtggggcggcgttctctatgccaaaggcaaactgtaccagtctcgtcgttacgacattactcatatcgttgaccgtgtaggtggtggagactctttcatgggaggtttgatctacggtctgctgacttatacgacagacgaccagaaagcactcgatttcgctgtcgctgcatcttgcttgaaacacacgatctacggcgacttcaaccaagtgacagtcgaagaagttgaaaagttgatgagtggcgatgcttccggacgagtttcaagataagtgacaattcaatcataattcataattcagaaatcttatcatggcaagattcaataaaatgcaggtactcgatgcgatcgtcagcacagggatggtacctgtttactacaataaagatgtagaaatcgcaaagcaggttgtcaaagcttgctacgaaggcggtgtccgtgcattcgaattcaccaatcgcggtgacttcgctcatgaagtatttgccgaactgatcaagttcgctacaaaagaatgccccgaactggtattaggcgtcggatctatcgtggatgccggaacagcttccctatacttgcaattgggtgctaacttcgttgtcggtccattgttcaacccggaaatcgcgaaggtttgtaatcgtcgcttgatcccatatacaccaggatgcggttccgtttcggaaatcggtttcgcccaagaagtaggttgtgacctgtgtaagattttccctgccggaaacgtaggcggaccatcgttcgtgaagaacatcaaagctccgatgccttggtctatgatcatggctacaggcgccgtagaaccgacggaagaaaatctgtcggcctggtttaaagctggcgtgacttgcgtaggcatgggttccaagctgttcccgaaagaaatgattgcagccggcaactgggaggcaatatccacactttgtcgcgatgcactggcaactatcaagaaatatcgttaaatgatttctgaattatgatttatgcgccgatgataaatcataattcagaaatctataaatcataaatctaaaatcataaatcatgaaatcctttctcgattccaatttcctgctccagtctgagacagctcagaaactgtatcacgaacacgcagccaaaatgccaatcatcgattatcactgccacttgatcccgcaacagatagccgacaactatcagtttgccgacctgacggaaatatggttgggtggtgaccattataaatggcgtgcgatgcgtgccaacggcgtacctgaaacatacatcacaggagataaaccggcgtatgaaaaatttgaaaaatgggctgaaaccctgcagtatgccatgcgcaaccctctatatcactggacccatcttgaactgagccgtatcttcggcatagacaaggttctgaatccgtccaccgcccgcgagatatacgacgaatgcacagccaaattgcaaacaccggagttccgtgcccaggcaatcatggaacgtatgaacgtggaagtcgtatgtacgaccgacgatccgatcgatgatttgaaatatcatacccagatccgccaaagcagtctgaaaaccaaagtacttcctgcctggcgaccggacaaagctatggcaatcgagaatgtcgatacatataacgaatatctgaccaagttggaagcagctgccgacatgtcgatcctcaacttcaaagacttgatcgacgctttgcagaaacgtcacgacttcttcgcgtcacaaggctgccgcctgtccgaccatggaatacttacattctatgccgaaccctatacggatgctgaaatcgaggccatattcctgaaagcacgtatgaagaaagaactgacagtcgaagaaatcgacaaattccgttctgccatgttgtacgaatttgcggttatggatgccaaaagcgactgggtacaacagttccactatggtgcaacccgcaacaacaacgtccgcatgtttaagcaattaggtcccgacacaggctacgatgcaattggagatgcagaagtcgcagctccgctagctcgcttcctgagccgtttggacgaagaaggcgtactggcaaagtctatcttctacaacctaaacccgcgtgataacgaactgctgatgacaacgatctacagctttaacgacggcacggttccgggcaagatgcagtatggctccggctggtggttcctggatcagattcacggcatggaaaagcagatgaacgcattgtccgacttaggattgctgagccgcttcgtcggaatgctcacggattcacgcagtttcctatcctacccgcgtcatgaatacttccgccgcatcctgtgtaacatcctgggccgcgaagtggaagacggtctactgcctgcatccgaactgccgttcatcggtaagatggtcgaagatatcagttacaataatgcgaaaggatatttcaagttctaaaagaaactttccttaattataaagggccgcgtcagcaaagatttgacacggcccttgtttttttacctctttcttttcgctttggcagccgcctctttggccttttgggcttcgcggcgggctttttctttggccttcagcttttctttgtattcgcgttccttctgcttacgttctttttccttttgcttcaggcgttccttatactcacgttctttctgcttacgcagttcttcacgggctttgagtttcgccttacggtcggcttcgacctgtttcagcttggccttgcggtcgcgttcaagctgtttttctcgttcggcttttgctttcagcaacgcttcttcttcagccttttgcttcttcagaagttcctcgttttcttttgccttcttttcctgcaattctttttcggctttctgttgagcttcaaaagctttacgagcttcttccttacgagcttcagcttcatcggcttcgcgcttgcggagttcttcgatctctttcaacgtgagttccttcggttgttcgacaggagtgacaacagcggaaacggtgtcggacgatgccggaacaaccgtatcttttacaaccggctgtacagaaacagtatctacatccgccggaaggagcgtttctgtttcacggacagtcattgtatcgaccgccggaagttctaccggaaccgtatcttttacggcaggcggtacaacaacttcttctacagcctgctgctggcgttgttctttcgggcggacggtcttcttgacaggttccggcttttcttccggaatattttcagaatcctgtgcttcggcctcttcagcttttgcctcttcctctttgatctgttcggcagccatacgggctttccaacgaacggccagttcaggaacggcctcaccgaagttttcctggaagaattcgacatattcctcaagcgtctttccccgcatcaaggtttcatagttgtcgtcggagatcggaagaatagccacatttttgtccaatgcagttgcatagccatccgctccgtagatcatcttataataatgcaagatttcatccaaattaaagaagccatgaatcgtcaacatgctcatcggaccggcttcttcaaaactcaaatcgaactccttcaccataaaattggcaaagttataggcggcaacggcaaaaagcaactggttacgatcgagtgttccggtcgggaacattaacagcatccggtaagacgtgttagattcagccgtaaagacacgtgccgagtcggctgccgacaacgtaccatcatcccccacaccgaaacgcaagttccaactcattcccctaataccaccttgaaccatcatacgcccacgcagaacacctttcagcatttcacccgccagttccgtcacatcagccgtcggatatttctcaaccaatgctttcaaggcgtttttgaaaccttcagcatccccagcctgcacataggtcagcgcctcgaggaacatgaacttaggcaatagatccgccaacggatacttggcactgacatcgcgataattacgacgaacggtgaccgtatcttccgccaggtaacttgcataggtcgcctggtagatagaatcctgcaccttgtccatcatccggatattatattcgtaattcggatcggcaatagcaaccgcataatccgattcagggaaagtcgtaaccaacttattcttataagcagcagcgagcgcttggtttccggaacgaagagccatcagataaacctggtagtagctttccaaaaggtgactatgcttcgggaaacggcgttccaactcctcaaaagcttcggttgccaacgggatatcctcgagtttgtctttataaatcatagccatgttatagagaccatcttctatgataatattggaagcctggatatcttcgggtgtcaacggaagctgctgaatgtaatactcacgtgttttcgggtcatcggaagcagcaggttccagtccggcctcgagcgaatcggtagccagttcgcccacctctccttcggaagcatcctcagtttcgtctgccatattctcattaaaagtggacatttctttcttacgtcgacgccagtcatcttccagcgcacgccgtccccatttacgttggaaagctgcttttccctgtgatactgcctgcgggttatagaaatagaaaccggaacctccggacgtcgtcggtaatgtgatgccgccagtctctgttcctggacggtcgataccagtcccttttgcctcctgttccgccagataagcttctttctcggccagagccttggcttcctcctcctctttcttcacctgctcgatgattttgtcgatcacggcaagccgttccgactccggcattttggcaagagtttgcaaactatcctgcaaatggaccgcctccacatgcacgaccaactcgtccaagatagcagacagcttggatacccgttcatagtctttatattctttctggatgccggacaatgcaccgctgaaattcggttgtgccttgacatagtcgcgcttctggaaataaagatcacccagtttgatctggcagatcgccttgtccaaaccgttctgtgtgcttttctccacacccagctcgtagtttttgatggcattgactgtatcttcacggctcatatagacattgcccaacgcataatagacctgatcgagcaggtccttgttcttatcgcttttcgccatccgttgcaacatcttgatcactttctgataattgccgccagtaaatacttcggtctggcggatacgggcggcaaactccagttcataaggaggattagctttgatcacctgtccgaacatctggtaggcaagcccgttctgatcctgttcggcataaatctgtcccaacaaatacttcatccgggtacgctggcgccggttcttctctgccttgatcgccgtcttgaaataagggaccgcttcttcatattgcttattcttcaccaggtagtcggcatataccgccgcatactggttcaggttcttgcgagggataccgttcgtattcagttttcctaagatatcttccgcttcatagaaccattccatctcggaatagcagcgggcctgccaaagacgagcttcggccaccacttcttcatcatgggcataatgacgggctatgtaagagaaagtggcagatgcctgcaagaaatcagcattatagaactgcgcctgccccatcatcaaccagcactttttgaggaacggattgtattcttcctgttcctgccaggcacgttgtttgggatcattgcgccatcccggtttcttaggcggctttgctttgatggagtggagcttgatcgctttattgcttttctcgatcgcccggtcgaaaggacctccggtttcgggcttgtctttcggttgcgcactgatcgggtacatcagtatcatgtcggaatagctttccttatagccgttctgcatggaaagcaacgcttcgtcaaacgatgtttttccgttgaaatagatattatagcgggaattaaaagcgtgatagaagcggcttgccttggtattctttttcgtactgcaagaccaaaacaaagagacaatcaataatgcgattatatagtagaaacctttcttcatttccccttttaacgctttaaaaccgcttttattgctttcactatcaaaaagaaaaggactaggacaagaataataaacgccccggaaggcacattcagaagataagaaaggacgagcccgaacacacatcccaagaaaccgatggcaatgcttccgaatataatcttcttaaagtctgacgtaaaaaggtttacagtgatctgaggcaacgtcagcaaactcatcagaagcatgattccgaccagacggatcgaaaggacgatcgtcacagcgatgcagcacatcattacatattctatgcacttgacgggcactccttgcgtcagtgcaaaatccctatcgaaggccacataaacgatctcccgcaggaaaagcgagaaaaggataaccagcaacaacgccaaagcggctatccagataatatctcccgtcgaaacagtcagaatatttccaaaaaggtaggcggatagattcggtgcatatccgggtgtcaggaaaataaagataacgcccaatgccattcctaacgaccatatcccggcaatagcagaatcttcacgcacattctgtgtcttgctcgcccactccaccccgaatgcggagagcacggaaaacaacattgccatcaagatcggattcatcccgagatagaaccccaaccccaatccaccgaaagaagcatgagtgatacctccgctgataaagacaagccgccgtgacacgatatatgtcccgacgataccacaagcgatcgcagtcagcaggctgcccaaaagggcatgctggaaaaaaccatattgaagtaaatccattttctattctcctatatccttttttatggtttcccggcaggaaacttctgtttcattataggggaactcctgttccatgcctatgaaactgttgttccatgcaaggggaacttttgtttcatggttatgaaacttaatgtatgcgccgctccccgacaatcaggaacgcttcgtccttcagctcatccggtaaattaatagcacgaagttgcagactacgcaaccagccggccacttcgatctcctgcaacgtataaagcacatcacggaactcgttcacggcatcttcatcgtatgcatcggcctcgactccccgaaaacggtccagttcttcatcgtcataatactcgatttttttgctgactgccgccaacagactgtcgcgttcacaggtttcatgctgtccgcaacattcgtcagtgacaagttcctgtgcctcgggaatttcagaaatctccccacgttccagcatcttctgcaatttccggttccgaaaataaccggcaatggcaacaacaacacccaatacgataatacctataacaatataccacataataattgacaattaacaatgagcaattgacaatggacttccagacaccgacaactaattgtcaattgccaattgttcattgtcaattataataaagcctgcggttctcaagtctctccaataatgcggataacttttgctgaccacctgcgggtcagctatctcgatcccttccggcaacacgagggcgacaggtgcaaatgccatagccatacggtgatcttcgtaggtcgcgatcacaggatgcgcttgcggttcacaacgttcgccgttccattccaaaatactgttgttgctgtctgtcaggagatatcctaatttgcgaagctccgtcttaagcgcttcgatgcggtcggtttcttttatcttcagactttgcagaccggtaaaacggaaagggatattcaataacacacaggtcacgacaaaggtttgagccaggtccggctcgtttacgaagttataattcagtttttgggtcctattcccgttgtgcttcaaaacaacgccccggtccgtgtaagtcgtacccacaccaagctgtgcaaacaatttggctccggcggcatctccctgcaaactgttcttaaacagccccagcaattcaatctcggcattttttgacaacgccatcatggaataccagtaggaagcagcactccaatcggattcaacggtaaagggtatcggatgataatcctgcggtcttaccttaatggtctgcccgttccattccgcctttaccccatattgttccatcagctgcaatgtcaggttgatatagggtttcgaaatgacaaccccttcaagatgcaaggtcagcccgttctccatcaggggggcaatcatcagcaacgccgaaatatactgtgaactgaccccaccggcaagcgaaatctcgcccccctgcagcgcacttccgaaaatgcggagaggaggatatccctccttctccatatattccacccgtgctcccagcgcattcagcgcatccaccagtatcttaatcggccggttcttcatccgctccgttccggtaatcgtccactcgcccaccactttagacaaaaaagccgtcaggaaccgcatcgcagtccccgcggcttttatatcaaagtcacgatcattcgaattcaacgccttcaccatcacctccgtatcatcgcaatccgacaaattccgaatctcatacgggctatagctcaacgcattaagtatcaacgcacgattacagatactcttggatgcgggcagctggatggaagctttcagtgaatcaggagactttattgtataattcatacttttgcattaaaatggaatacaaaagtacggattttatcgggaagtacgaaaaacatcatctcaagggaatcatctttttctcttctttctgatttcgaaaaatggtaagcgatactttccctctccatttattttgttccataactgaaaaaaattcttcgatcgaagatatcggttcatcattcactaaacgaataacatcgttattctgtagtccggctttgctaacaggacttcctaaatcgatatcaacaataacaaaacctttttcgtccggtaaaccaaaagctgaacggtctcctaaacctttaattatacgtattttcgctcccaaccaattgtattcatcgacatcattatcagcctccattgttcgtatttccggaaattctggtgaatgtgctttttcttttaagtcaagactgtatacgccaaatctatccagaggtatattttcaaagccaatttgaaagacatcacattcttttggtaatgtataatcacctttacctgcatctgcaaaaagcaatttgccactgacactatgcttgtccgtttgatttttctgaactctttctaagctcctctccgtggaaaagaaattaaaatcgatttcttctccccaaccattaagtgaaatcgggtaataaggctgcataaacaaattacgccgaattacgtctttgctttcctgaaaccagacatgaggatgtaaagaattattgattaaaatattattttcaaccgttctgtaaaaaccttcacgtagttttataccgccacttaaacatacattattatatatgtgataattggagcttccatcatccaaatcaatatcccatccatggtcacaacgaaaacgattgttccgaattattgtcgtatataatgcatccaataagattagattaggatgatctgcaaccaactctgccatttttcggtagtccggatgccaaaaacgatctcttccccatgaattgaaagcaccatgatcacttgtctccaatacagtattaaaaacatcattatattcgatcacatgtcctccaaaagctccgtcccctacattaatgcctgctctagggacatcataaatcgaattatgtctgacttctatcatggctgcaatttgtatttcaactcctgcgacttgcttttccacagtaccgagatcatgaatcaaattatcttctatcaagcattgtcttggatacctgttattcttcggaccgggaataaagtccaatcgttcataaagagtataattctcatatccgtatactccggaacgaaccgctgaggtatctccgacaacacaaatggcacttcctcccgtatgatgaatatgatttcctcttatcgtatcgttgaaggcatatttactcaagaatacagcatttccacccaattctttaaactcacatccagcgactctgcaattcttcgtattctccaataaaacagcagcacctctatagatgccccaatcgctgcgcatcaatgtttcatagggttccataaaagttctattcgtacgtgtaaaacataaattctgaaggacaacgtgcgctatcggttcttcctgagttccacgtatgacgatcaattgaggagttgtcgatatctctatgtctgctttatccaaagattccccggaagcaggataataatacaagaccttctttttcttatcccaaaaccattctcccggcgtatccaattcttctcgtatattttccacaaaccgtaaggaaggatgtattcgagaaggacgggaaacttgatatccaccttcataaatcagggagtcgcccactttcccagtaattcgatagtgttggcttccccacattccggcgtgcatggaatgtataaaaccatcttccgggtgtttccattttttgatacgctcaggtgacaatacgccttcggatgtaccgttgaacgtacccttttcctgatagttcggatagcgagccaaaatctttttctcaccattaatccatagctggtctatccgatgcgaaaacggcgtttcccatatcccgtttttacctttttcccaatgcaaaatatgctttttcgatccgctgatgacaacatgctcatttttccaggcagagatcaacacatgtttatttttgattttatcggttgtaataactatagaagaatctaaatagtaagtgccttcttttaaataaattgaaatcttttgatccggaatatctttgattctattcagagcaacatccaatgagtaaagcggattttcaattgtcccctcgttagaatcgtttccccaagtcgacacatacatgcatttctgtgcttggattgtaaaactatagatcaacaacaaaacacatttaaaaatcgtcttcattatttttctgctttagatattatattatttaggctttttaacaaagtatatgattggggagaaattgttccatcttgataaattcgaacatttatcatcggtaagttttttcgtctgtttgattcttggataatcttcaccaattctttcaatgataaaatgggaccgtcaatagctctatttttataaatatgtgtccagtctccgggttccaaagtacctgaataagtagcctgtaagccatcttgcggaccaccatgaaatattccgtcaccatctatctggaggttgggattgtctacgcctgcactagtcaaagacaatcctaattctcccgcataataatcctgaaaatctgtcagtttaggtaatatccaagaattaaaacaaataaccaaatctcgattccctttttttgcagcttccgtaattttctcaaatgatgcaccattcggataatatccgataccatcatccatccataaaccagacaaccgactaccatatctaagacagatctcttcaataattttttcaacattagtaaataaattttctgcattgccacgagtgtaattttgtttattccaccactctttatctccatgccctatatgataatataaaatcaaacgtatatcgtatttcgataaagcatctgataaatcagcaattaaatcccgctttgttgttctacctggtaaaatagaatcgatcgtatgaattggagctgggaagtaatactcggcccacgtagtcgtaaaaaaaacaagctttcctccacattcatgcacgacttgggcaaaacggtctacatcaaagttattaacagcttcttcgtaagttagttgctctccggccaaaggcatacttttggaattccaatggaaaaagaaaccgtaaggtaggtcggccatccaagaggtattactacgaagagattttgcttttgcttgtaaacgctcatacgtattgaaggtcgcgacttccaaagcgtacaaacaaacatctaaattttcatgtttttttagttcttcaattcttaaaaataaatttgagaatccagtatcaaaatgcaatggatgagaaaattgacaacgttgccatcctgtagtttttatctgacaaaatatactatccttgtcattagaaagaaccaaattaactttttccccttcttctaaaccattcacacaaacaataactgttgctaaataatctgcagcatccgaatttatagcccaagaaatcatctgatccgatctattccagttttctatccaaaaagttttatatggttcttctgggtaaagctgttttattccgttagtcaatttcccttgagatggaatcaaccgattaacaattaatgaatctaatctcaaaactgctgggacaacagttgcgttacaataagctaccaagcctataaaaaataatatatatataaatcgctttttcatcatgtttataattataaaaagggccaatccttcaaaatctcaagattagccctttacatatttacactatattatctataatccggattttgagggatattgttatttagaatttctgtatcaggaattagccaagtattattatatattcctattggcacattcaatttatcacctcttgctttttgtactttatcaaatgtttgagtacgtttcatatcataccaagcaaatccttcttcataaaattcatgttgacgttctaataagactgcttcacgaaactcttctttagataatccagacaaatcaggaacatttgtcggatcactttgatcgacacgggctctttttcgaatgatatttatatattgataggcattgaccggaccgttcatttcattttcagcttctgctacaattaaatacatttccgctaaacgtatcagctgagtctgccaagtcaatatagaagtattggaagcaggaagttcttgctccaaatattcttcattaatatatttattgtagtaactacgacttatcactttcgtcccttttgcatttacatactcttgttggataccccattctttacgcatgtctcctttatcgaaacttttaataaatgcatctgtcggcaaatataaagcagtttgactattcactggagccgactctttatgcattgaactgtatgaggtcggatccgaaaagagttgtgcccatatagtttctgccgtatattgctcagttttgaaaactttatcaaaagtcggcatcaacgaatatctgttgcaattaatcacctctaaggctttttcttttgctttagcatagttttcagtcaaattcattgggaaaccggcagacgtaagataaatacgggccataatagcttttgccacgtatttatcgactcttcccatatcttgtgcatcttccggtaatttttgttccgcatctaaaatatcttcaaaaataaaattataaatatctgcttggggagttctttctatcgctatatcggaatcactcgttacaactttatcacgtaaagggacatctccaaaaagctgtactaaagtaaaataagaccaggctcgcaaacatttggcttcccctataatcttatttttcgtatcctcggaaaaatcttttccttccaaggattccaatatcatattagcattcttaattgtactataagaatcggaccatgcatttctaaatgcataaaaaccataccctggattatttgcccagatatctccaacttgttcggcagactccggtttatcattatagtctgcgaatatttcggtcaaattcagattttgtccctgaggatataaacctttcaacgctccatcaaaatcttctactgtctgataaaaggaggatggcgagataaatgttttaggttcttcttctaaccaatttgaacaagatgtaagcaataaaaccgaaactgacaataatatttttactgatgttttcattttcaatcacacattaaaatttaacctgtaaacctaaagtaaacgacttcgcagaaggatagacacctctatcccatccattgacagcagaagatgtccaagaagcttccgggtcataatgagaataacttgttatcgtaatcaaattttgcccgctcacataaactgaaatatttggttttctagggccggaaaacaattgagtcggcaatgtatatgccaacttaatatccttaaaccgtaaatatgaaccattttcaacccaaagagaattagggtctccaaaagccaaatagtctttggtcgatgcagatgctcgtgcgtattttgcattcggattttctggagtccaatgattttcccatacatctttacgaatattccatgttccacctatatttgttatgcttttattaaactcattcacgatatcacctccgacacttccgattaccagaaaagaaaattcaaaattattccagttaataacattcgttaagccaaaagtgaattttggctgcgtattagcaataattgttttatctcctgtcgtgattcctgcttttccatctgtatctttgtagcggtaatcacccgccttttttgtggcttctccattcaaacgggcctcttcatccgtttggtaaattccttctatttcataaccatataattggaaaggagctttacctacaaataatgggaaccagtttcctccactaacaggagcatctatctgttgaattttgtttccataaacgtcagttcctaaatctttcactatcgacttattagatgttatattcaaattcgtcgtccagtttactttacctttcatattgactgtgttgattgctatttcaaagcctttattatcgatacgtcctaaattccttaacatcgatgtatatcctgaagagggaggcagagttgcattatacagtaaatcacaagtttgtttccaataataatcaaagctaatatttaatcggttattaaaaaagcccagatcaatgcctagatcggtttgtgttgttgtttcccactttaaatcatcattcgccatagaagataaaacgaaaccgacatcttttccatttccaaaaatcggacttgaagttcctaactgggcaaatgtttgatatggattgatcgactggttaccagtttgtcctacacttgttcgcaatttgaaattactcaaccaatctacgtccttcataaaatcttcttccgatatcctccaagctagtgcagcagaagggaaaaaggcaaatttgtgatttttgctaaatttagaagaaccatcataacgagccgttgccgtaaataaatatctctccatcaaattataattgacacgtccgagaaaagaaaccatacgataatcattgaatccagaagcaggaacaccaggattagaggctgctcctaaattattcgtttcatagacatctcgcaaaaaacctgtgccggatccttgaagttcgtcgtattgataagtttggaaagtaataccccccattaaatttaaagcatgatttcgattaaatttcttgtcataggttaagatgttttcatttattatcgtgtaataacttgattttgttttaagtgcatcaccgtccagtttgcctccggcagataaaccaatcggtatgtagcgatctgtacttgctgtatttacttcagcacctgcatttactcgaaaagtcagttcttccaacatttcataatttaatgccatattagccaacaaccgagaattaacgacctgatttttatataattctgacatcccgacaggattcgtacctccccaaggagttcctgtaaatgtcgtataatttccatctgcatcttttacttccgaagtaggcggcatcaccattgcagtatatgcaatcgctcctccaccatctgcattactatttgcagaattttgtgtcccatatgaataagcgacactggcactcaaagataagttttctgctaatttctgatcaccattaacacgtattgcaaaacggttataattagaaccttttataataccttcttgattcatataatttagagaagaatataatttcgttttatcagtaccgccagaaacagaaacttgatgactgtgtgtcaatgctgtctgataaaccaaatcttgccaatcattattgggtagtaacgctgcttgatcgggtgtaattacaattccatttccatcattttgagaaacctcattgaccattgcaatataatcatctttttccagtaaatcaagttttttccttaacattgaaattcctatatatccattataatcaactgtcgcttctcccgtactacctctttttgtcgtaatcaaaacaactccattagctccacgtgaaccatagattgcagtagaagatgcatcctttaaaacttccattgacaaaatatcttcgggattgatatccgaattcattttttctacaggcattccatctatcacatataaaggctcgtttcctcctgccaatgaattactaccacgtacacgaatcatcattgattctcctggctgaccggttcttgcattaacttgtacacctgcaatttgaccttgtagtgcccgatctgcacttgttattccaacttgacttacatctttcatttgtacggatccaacagctcctgttaagtcgcttttttttactgttccatagccaatcacgactacttcatctaaagtttcagtatcttctgttaataaaatattgacaacatcactgttcccaactttgatttccttcgaatcatatccgatataagatatttgcagcaaactccccatggaaacttctaaactatattttccgtctatatctgttactgtcccgttcgtcgttcctttttcaaaaacgtttgctcctatgataggttctcctttttggtctctaacaacacctgtaattttcttcctgtttttttcttgtgctgccgatttcaattgttctggcgaagggtttatcagaataaggttattttctgtaatttcataatcgactccttcattattaaatagttgtcttaacacaaactccacagactgttctctcacttgaacagaaaccttcttatctaaattaatctttccactttcataaataaatcgaaaatcagtctgattttcgatcaaataaaggacatcctttattgactgattctgtacattcaatgataactttgtggtctgtgaatatacagatgcagaaatctgcaaagaaaatgcaatcaaaaaaacgactgtcaatttcataatagataatatctttttaagagtcgaagactggtccaactctaacatattaaaaaaattcatatatttgtatattgattgttagttaattattagtgcttccaacactaattttattatcaaactcataacgggagatgtggcagcatttcccgtttttgtgtatccatggcattctatttcataggcaattcttatttagaggttatacttatatgttttccttttacatgataacttatattacttagacgcgacaatgcatccataacgtctgttacagtctcttcctgtattactccgttataacggatcttttctcccaatcccggttgaagcgtaatttccacatcataccatctttccagatatttacaaacaaccgacagagacatatcttccatatataacttattgtccaaccatccataagaatgggacaaaacaccttctacctgcttaatcttatccgtcttcttatcgaaaacagctatctctcccggcttcatcctcaacttctcgtttcctttctccagttcgatacatcccccaaccaaagaagcctggataaccggatcatcagcatacgcctgcaaattgaaagaagtcccccaaactctcacgtttaaacccccggccactttaatgacgaaaggatctttactcttggacacatcaaaaaatccttccccctgaaaatcaacttcccgcgtttttttcttcggatcataagaataaacgacttcagaaccggcattcaacttgaccaaagatccatccggcaacatgatctccgaacgattcccataatcggcactcatactgaccagaacctccgatcctttctgaaaagttcccataaaagacaaagctaacactatcaacaaagatgcggcaaccccggaagccgtatataacatgtttttccaatatttccgaagatatactttctgtcggtttatcttgtcaaccttttcccaagcaagatcaggatcgaaagcctcaacttctgtataacgatgagattcttcccaaatctttttatacaaattaaattcttttctatgggactcatcttcggccaaccactcaactaataccggatcaagacgtttttcatcttcaccgtccagtaaatagtccacgatatagtcttttatagttttttgttcttccatgaatcttgcttttattatatgacactataaataaaaaaaggtcctattccggacccgaaaaaattatattccttttaattccaaacatcgcctcagcttctgaagcgagatccagatctgatttttaatcgtttttatcgagacatcgagtttttccgagatttctttttgtttcaatccttttatccggtgcagcaataacacttctttacaacgaccgggaagatgatcgatacagctataaagagcgatccgaaattcttcagactcgacccggtcgtcttcatatgataactgatcctgagtttccgacagattattaaaatagacttttgaacgaagatgattcaatgccaaatgtttagccatcttataaagatatccgccaacattttctttgatttcaatcctttcccgattcttccatatattcagaaaaagctcttgcacaatatcctccgtatcacttttatccatgagcaggctatatacatattgacaaaggcgaccataataacgctcaaacagtttattataactgacgtaatcatttctcctgatcgcctctatcaatctttcatctgtggtattagacatactcttatccggtttatctccttagtgcccaaatatacaacaaattttggattgaaaccggaaacctgaactttttccaaggcaaccataccaaagaaaaaacaggagcttatcatataagttcttcctatttcctctgtcactgtatcactgattcctttttaccaattgatattcaacctgttttatttgtgatatatgcccgttttctctatcactaccctatcactggcaatttgataggaaaacaggcatcgcgtttatatacaactgtatataagtgcattacaaatagcacaaacgatacccccctattcccatccctgtaaatcactcgattattttatgtaaaaacggctataaaataggtgaaaccgggtggttttcattgctcggcaaggcactttagttgccggacacccccatgttacccccttttacacccggatgtaccggctccctacacccggatgtaaaggatggcaacatgggggtgtttacggaattatctgcctgtttctgctaaaaaaagagaaggcttttgtggaatgaagaaccgtattttgccaatttaacacctattatattcgtttttacatttgtttattcgattattttatatgctttttcaaaagtaacagaagacaatatgttggtttccaatcatatgataaaaacgtcctgtttcaggagtgatagaggcagtgatagaggaaaacctcctgtatcactgtctctaacgattgaatatcaatagctacaaccttcatggtgatagagtgatagaggatttgcaggaaacttcgtatgtaatgctttgaaaattcaaaggatgtaactaatagacagttagagtccatttgtatccttattcaaaataatattgacatagatattttatattcatctcaatgtaaacatcaaatttatatgcagttacatccatatatcaagattaaatgaaagagccgtggatgaataccaaccataatttaaaacaaatgccatatcaagactaaaaatttaccttgatacagcatttgctttaaactaataagaaatctacaatatccgttgatacaatttcttttcctgaggttgtatggaagtaagatcagctattttcaccggttggccggtcgcaatgctgttacgtgccgcaataccgactagacaagccaaagctccatcgcgaacactagcacactgcttatacggatcttttatcccaggtaaaaaaatctgatcctttagcaatgcatcccctccgccatggccagacgttccgaatggaatctggatatactcacgttttccaaaattcttaaacaaaacaagttcatcaaaattcacatccgaagtcggacgggattcctgtatccaagcctctaaacgccctttcgttccgttaaaggctatacgataaccttcataagggctgtaggttgtcagggaataagcgacctgcacgccatttttataacgaatcgttgccgccattttatcaaagatattgacatcattcttaaacacgcatccatcacgaagataaccatcatatttttcgttggctacatataaatccatataattctgatttcgcgttatatcgtaatagaatttacatttggaagtatgaggacaagtacggcaattctctgcccggaacgttccgttcttaccataatgatccaaactgcccaatgcatacacactttccggatcactgtcaatccaccaattcagaaggtcaaagtggtgactggctttatgcacccacaaagaaccgctgcattctaccaaacgatgccaacgacgaaaataatcggcgccatgagaagtgtccagataccaatgaaaatcaacagaagtgatatcgccaatctcaccggcacggagtaattcccatattttcgcacgatgtggagaataacgataattaaatgtcacacggcaattctttcctgtccgtttttctgcatccaaaattgcctggatcttcttttcatccgttgtcatcggcttttccgtaatgatatccgcgccaagttccattccacggataataaaatgatgatgagtactatccatagtcgttacaatcagcacatcaggcctggttcccttcatcatcttttcaaaatccgtataagtaggacaggaagccccgataatcttcttaccggtttccacacgaccttcattcttatcgcaaagacctacaaactcaatgtagtcaggataacttttcattaagtcatatccccacatggaagtacctcttccgccagtaccaacaatagcaaggcgaagttttttcccagcaacattcggattttcaacagcttttgccgctacttccgataatggattcaataaggctgccccagttatagcgcctgtcgcagctaaaaagtgtcgtcgtgatattttattcataaccatcatatttaatagaattatttataacctttattttgaacgaacacatccaagttcgtcacttcatacaatgcatcttgaggaagaggacgatagatatgataatccttgatcaacgtaatatccggattatgctctttcacccattccaccattttgccggaacgtttcaacatataccagcggttcaattcacaccccagttcacgtgcaccttcttccaagataaaatccatatccacatcagcagctgttaccttcaaggcactttcatgtccatcgatcaaagccctttttctcagttgagtaatcacctctgccgctttttccggttggttggttcttacatacgcttcagccaaagttatatagacttctccaaggcgcatcagaatcaagtctttaaaaccttcttcccgcttagcctcatcacggcttggatccagatattttgtcattgtatgatggcaggatctaccgttgatagtcggaattccggtgttaatatcataaagatccgtaatattgtcgacaatgattcccctgtcttcatagctttttacatattcatccgaaacaacatccagtgtccggataagtaacgtatccgaatagtcgggctcgttattccagttatccgggattctgcaccacgcagtctggaaagtctgttccctacgtttatcaaatttatcgaaaagactgatataataataggtaggcatcgtacaacgatattcacgaccatacacgcgggaatgactccataatccatcaatattgatattcgggtttttagcagacttgttataccaacctacgaaataccgatgcatactattcgcatcaatatccgtaagatccattccgttatacaccaaatcgcttgtatattgtattgaccagataatctcgtcatttatctggttattcacgtcaaacacagatgcataattatccaagagtttataattatagtcattaataattgaattacataacctcaccacttcatcataacactgttgttttgtataaccggctcctgtaataatcgcatcatcataagcagccaatgccatcaatacacgcattttcaatgttttagcaactccgatattcatacggccccattgagtattctgaggtatatccaaatattggaaagcaatatccaaatcttccaatattttcttgtaaaagacagcaatacccggttggtatccttctgttattaccgattgggacggagtatccgcataatgggacgcaggaccatatgtctcgacaatcataaacaagtaaaaagcacgcaaagcatgaacctccgatatcagttggttctttttttcctcatgtgcaataggagtttcctgtatatactgaactcccagatttgcaacattcaatcccttataaagatatttccaatactgggaattccaacgattagagatcatgagagggtcattataaatcatagcctcttcataaggccaaccgacaccattggttgcataagtcgtcaaatccgttccacaatcagcaaacttatacaaacgttctgtcagataacgattccgttgatagatactcaagataagtgattcaaccccttcttctgttttcgcatacgtatcgctgatcaacccttttggttcttcttccagaaaatcacatgaaaaggaacttgcagataatacgattaataaaaaaattgctatgtttttcataatacatgacttattagaatgttacattaactccgaaattataactactgggaaccgtataattaatatcaggttgttcaggtataatatcaaactccgctgctctatacaaataacctatatttctcatttgcacatagaaacgtaatttcctgattggaaccttctttgacagcagattctcgaaactataccctaatgttatatcctgaattttaatatggtcgcctttctgatagccattagaggtacgataggtatcataaccgctcgcttgatccgcacgaggataactatttgtcggattatccggagtccaataatctactgccggcaaccatctctgcccgtccatcgtgatatcatcatatggagccggcttaaccaaatacccccatcttgagttcagattgaaagaaaaatcaaaattcttatattgaacattcgcacctaatgaagcaatccacttcggacgaacctgccccaagattatgcgatcatccgcagcactaatcgaaccatctccattttgatctttaaccttgatatcccctaccttagcattatatttagcagcagcctcttcttcacccaactgccagataccaattttctcataatcatagaacacacctaaaggttctccgataaaccatttattattaggtaaatcttctccactgatcaaagctgtaatcttttcccagtttctggaagcattcaatgaaaaatcgacattcaaatcttttgtccttaccggattataatttaggttaaactcaactcctgaagtttccgtctccccgatattctgccaaatatcattgaaaccggtaaatgaaggaatcgtcctcttcatcaacaaatcactcgtctttgtattataatactcgacataaccattcaatttattattgaataatccgaaatcaacccctgcatttacagttttggatatttcccagccaagatcaagattcacaatcgaagttgggctatatacatagaacttattagatgaatcttctccaaacagataagcatactgtgacaaagaagcaagtgtttgatagggtgaaatagccgtattaccaacagtaccataagagacacgaagcttaaggctattaatccaattcacattctgcataaagctttcatccttcatgctccaactgactcctcctgaagggaaaacagcccattggtttccttttgccaaacgagacgaaccatctgttctgaatgctatattgaaataatatttattcttataattatagcgcaaacggcctaagacagatgccagagcccagttttcaaaactacttccgatttttatattttccgtgttggaacctaaattatgataagatgtatactctaccggctggttatctccggataaagtacctttatcatatctccggctctgcatttcaccaacaaggtcaacgaccaaattatgatctccgaaactattatcatacgtaataatatggtttagtgtccactgatcataattattatactctttaccggagttcgtcttgacacctttgcccttgtatgaatctttaccataaaaatacccccgcttataatccgagaaaatataaccgaagtttgtatgcatactcagccatttatttatctttatatgcgaagttagattaaggttcaataaattgctttgggcatcatctgcaaactgtccgggtacatcatttgccaacgggttataaccggatgtgttcaacggattcgggaaataattaagatcaccattctccaaatacggatcagacaacggtgtcatatacaatatttcgttattgattttctggaatccggatatattatttcgtttcaatcgaacagtcgtacccaatgtccagaagtctgctaaatcatgatcagccgtcaatgtcaaattatagttctcagcatcattcgttttatagtagccctgttctttatcatatttaaatgataacagtaaccgagtcttctcgccactattgctaatgctcagatgataactttgtgtcaaagcattacgatacaataaatcctgccagtcagtataattgccattttttatcatatcaagttcggactgagtgaaaacatcctcatctgtgaacggggtatcccatccgtgagcatacctgtatccgtcacgcctgaactgtacatattcttccccagactgcaaaggcatcatatgaggaacgttcaaaccgatataagagttaaaattcacttcacgattcactcctttctttcctcttttagtcgttaccaaaatgacaccatttgcgcccatagaaccataaatggcggaacttgctgcgtctttcaacacttcaattgattcaatatcataagtatttacactccccaagcttccgggaataccgtccactatgattagcggattatttcctgcatttaaagatcttgctccacggatataaatttgctgatcatctcctgcatatcgtgccgactgaatatccagaccggctacttttccctgcaaggcatcttggacattgcttgttgaagcagcactaatggtcgatcctttgactgtagacatagcacttacaatatctctttttctggatgtaccataaccgatcacaacaatttcatctaaattctccgtattctcagccaaagaaatattcaatatgttcttcccgtccacccttatctctttggtatcataaccgatataggaaaccaagagaacagccgaaggagaaatatccagactatattgaccattcaaatcggtaacagtaccattcgtcgtccccttctccacaacattcgcgccgatgatcggttctcctttttcatctttgacaatacctgtgactttttttgtttcggaagatgccggggcttttctggaaatgattacatggccgttgctgaatgtgacggaacagttcatgccttccagcaattgttccaggacattcttgacgttgtcgccgactggtactttcttgatcacgcgtgaatcgttgacatcttgcgtgttgtaatctacgaagagtttcgtttgttgttcgatttgcttgaaagccgcctttaaggttaaattattgccagacaaacgaacctgttgattttgagcaaatacgaacgagctaccaaaagacagagctccaattatacataggcgggaaagcgtttttcccgcttttataggtattagattagttaatttcatatatttgtatgtttgaaaattgaatattaattattttcaacgttttacgttgagtcccaaaaagtcacaattcggtttcaaacgccggaaagagggattttcgcactttcgttctttccggttttcttttgttcatcctgttcctctcctctccttttaatttataaatacaacatttccctttatcttgaaacgaatgccgatcaactgctgcaaaacagccagcacatcctccagggtttcatgcggggcaaacttgacgttgtaatgctcgtccgcatatttctgggaattataatggatcgtcacgttaaacttccgttccagcgaagccatcagatggctgaaagaaacattctcgtaaatcaggtagccgctacgctccatcttataaagcaaagcatcgaccggccggaccgttaccgtatgcgccgcatgcgaataaaccagacgttcgttcggcttcaagatagtcggctggtgttcgcctgcctttacatccactttgacactcccctcttccaggatcgtgctcgtgcaagaatcagctggataggaagctactgtaaataccgtacccaaagcctgcacgtccagataagtcgtcttcacaataaaaggtttttccgtgtttttccgaaccgtgaacgacgcttcgccagtcaggtaaaccgtacgggtttccgtatccgtaaagtctttcgggtaaacgagcagtgaaccggcatcgacccatacctgcgaaccatccggcaaaatgacctgccggctctcgccataaggaacaaacaactctgccatctctacatgccggacaggttgtaggcggtccgtaacaaaaaaggtcgctgctcccgtcaatagcatcaatgcaattaccgctgcatatttgatccacccgcgatacatcgggacagtattccgacggaccggttcaacctgtaaatgtctttgcagggcatcccagtcttcgcgggtctcagcagtcgcctctgcaggcaaatgttcccaaaaggcctgcaacatatcgctcttttcagaagctccgccttccgcccgtagccagcggccgaacaggacacgtcccgaacgggagaaatgctttccgaaataaagctgtatgattcgttttatattattatcatttgtcataaaatcccatgctttataatggagtcggtttgctgtgggagtacacacaatcgaatatgccttttttctcaactttctttcattctgtttggctgatttgatttaagtgtagtttgttttcgacaatgtcgagatcatatttgacaatacagtccaagtgtgcaaaagaaaaaatagataaaggacttttcgaagaatggcaagggcagcggtcaagtgattttccactgtccgtttactgatatcgaggcgcttggcgatttcgtcattagacaaaccttcctcacggctcatccggtatattttgcttcgctggggagacatgcgctcgaccgtacggttgatgatcgattgcagctcgcggacgaacaaggtttcttcctctgattcggcttggcaagcatcctgcaggtattcgttcgtatatttttccgagacaatgagacggtcgaaatagtcgtacacggtaaaacgcgccatctggaatagataggaggaaaaagaacggacatttttaagtttttcacggtctttccacaacgagagaaacaaatcctgggccatatcacgactgacttccttatcgtgtgtcagaccgataaggaaatttaccaaccgaggttggtactggaaaaatagatgctcgaaagcttccacatttccggcagcgatctccttcaacttattttgctcctctggtaattccataatagatgcgaaatagcgaaaaatatcagaataatcaaaataaaagtttgcaactcagttgcattaattttgttgtacttttaccgtatcgagaaaaagagtaaagtcatgtcaacaaaacaatgcgaagagaaactcaaagataaaggcgtacgcccgacagccgcccgaattcttatattgcagaaactgtcggaacaaacatatcccatttccttgctcgaattggaggcacaactggaaacattggacaaatcaaccatttcacgctctttagcgatcttgttggagcatcacgccatccacgctttcgaggacggaagcgggtcgatgaaatatgaaatctgccggagcgacaccgagacgtgttttattgaaaacaggcatatccatttctactgtgaggtttgtcacaagacctattgtatggatcatataaaaatcccggtcgtacagttgcccgaaggcttcatcatggatacgatcaactacacggtcaaaggaatctgcccggcatgcaagtccccaaatctgtaaaacgcaatcgagttgcaaaaatatcttcggttctttgcatcggaataataaaaacagattgaatcatggaagctaaaacaacttgccactcaggatgcagttgcggacataataaaggagaagaacacccgaacgtggtattgccgatcctgtctttcatcctgctcattgtggggctcatcttagaccataccggacaaggctggttctcgccgacagtaaaactcgtctggtatctggctgctttcctcccagtaggactgcctgtcatacgggaagcttatcacgaagctttgcgaaaagacttcttcaccgagtttacattgatgtcggtcgcttcgaccggagctttcagcatcggcgaatatccggaggctgtagctgtcatgcttttttatacggttggagaaatgctgcaaaacagggctgtcgaacgtgcttcacaaaatatcagccgcctgcttgatgtccgtcccgaacgtacggacgtatttcgtgaaggtaattatatcaatgtctccccgaaagaggtacggacaggtgaacgaatcgaggtaaaaccgggcggacgcataccgctcgacgggattttacaggaaaccgaagcttcgttcgacacctccgccctgacaggcgaaagcatgccccgcatacttcggaaaggggatgaagtcctggcgggaatgatcgtactgggacaaaccgtccgcatagaagtgaaccgtccctatgaacaaagcgcattagcccgcattttagtgctggtgaaagatgcagccgagcgtaaagctcctgccgaactgttcattcgtcggttcgcacggttctatacgcctgccgtgatcgtgttggctttgctgatcgtcacggttccggcatttgccggattgatgatgccgtctttccaatacgtttttcatgactggttgtaccggggattggtctttttagttatctcctgtccgtgtgccttggtaatcagcgtaccgttgggatatttcggaggtatcggagcggcgtcacgtgccggcatcttgttcaagggtggtaattatctggatgccatcacccggataaataccattgcattcgacaaaacaggtacattgaccactggctgcttcgacgtgacggatatgcaggcgcatagaatttccgagtcggaactattgaccttgcttttatccgtcgaacagaaaagtacccacccgatcgcacaagcgatcgtccgctacgcaaagaaacagaatatctctgcagcaagcgtatcggagatgcatgaactggccggacacggcgtggaggccgtcatcggtggacaggaagtgcttgtcgggaatatccgcttaatgaaagagcgcgggatttccatccccgaagagttgtccgaccaagtagcgaccgtagttatctgcgccatcgataaaaaatatgccggccatctgctattgtccgatacgttgaaagacgatgccgtagaggcgattgccaaactgaggaagttaggagtgacagatatccgtttgctgtcaggtgataaaaaagagattgtcgaatcttttgccagacgtttaggtatcgaccgggcatacggtaacctgttgccggaggataaggcggcacatatccgggaaatggttgaagagccgggcaaaaccgtggcttttgtcggagacggcatgaatgatgctccggtattggcactaagccatgtagggattgcgatgggcggactcggttcggatgcggcaatcgagagtgccgacgtcgttatccagaacgaccaaccgtccaaagtggcgaccgccattacgatcgggcgcaagacgcgtacgattgtccgtcagaatatcataggggcacttgttgtaaaagggattgtgctgtcggcaggtgcattgggatacgccacgttgtggggggcagtctttgctgatgtcggtgtcgctctgctagcagtcctcaactcggtccgcatactgaacaggaaggtatggtaaaacggggatgtgtcaacatctccttgtccccgcacttgatgcggggacacaaaaggacagaccttatcaatcggatttttataaggtcggttttaatgcgatcccgcgtcaagcacgggaacaggacagttttgacataccctcatacattttgacacgcagcctcgtttatgatcgtttttcactttcctttcagaaaaggttttccatttttccaaaccacctcttcctgtgtgatataccaggtttttccgttatcgttatttccctgatagaacagataagttcgaccgtccaaatcggtaaaaatatgaggatggccggattcgctggaattccattcgccgggtttgccgttcttaaggaaaggttcttccgaaagacgtttccagacaatgccgtcttcgctttccgccactccgatctgttgaggggcattattgtaagctccggcataaaacatataaagtttgtcacctttctttgcgatcgaagccccttcgatacattttccttcccacggatacacgggatacaggatagaggaatccgttacctgtatccagtcttcccggttgaaattggtattgcccggagcaacagctactccctgcatctggatgtcgtagtttttatcgcgggttgcaaaatagaggaaatagcgtcctttgaactcacacacttccgcatctatggcacgcccacaagtccaatctccggccgggtggaaaatcggattcgtcggattccttctgaaatgaatgccgtcatccgatatggcatggcagatggcatctttcttcccattcccgtatgtctgataaaacaaatgcacctttccatccttcaccaacgcaccgggtgcacaaagtcctctcttctcataatcagcttcgggagcaggcgtgatctcgcccaccttcgtccagttcatcaaatccttactctccgcaatcccaatattccatccggaatcaggttcccccttcatcggcggaatggaatggtacatcaaatagcgcccctgaaaattaaccacatgcggatctttcgaataaggaaccccgacacgggaggtatcgccgtatagcatgaagggacgagcagaagagccctgtgataaaactaactgaaagtttccccataacaatagaataatcaaaacaagttgcttcataaatactatctgatcttttttaattgacaaatgtaactaatattcttctaaataaattcgtaaatcggatttacaataaatgatacagcctatccttctatccttttaccattaaacagggaaacaaagggcaagccatatacattatttatttcaagtaaggtttaccatccttccataaaacttcttgctgtgtaatataccaagtcttaccatgatcattattaccttgatagaacaaataagtccgtccgtcaagatcggtaaaaaggtgaggatgaccagattcacttgaattccattctcccggttttccatttcgtaaaaaaggttcttccgacagacgtttccagttcaaaccatcttcactgacagcaaccccgatctgctgaggagcattattataagctccggcataaaacatatacagtttattatccttcttaacaatcgaggcaccttcaatacattctccctcccaatcacactctggatacaagatcgatttatcacaagcttgtgtccagtcttccctgttaaaatcagtattcaaagaagctgttgccactccttgcatttgtattttaaaatccttgtcacgagttgcaaaataaagaaaatactttccattgaattcacaaacttcagcatcaatagcccgtccacagttccaatcacccgtcggatgaaaaaccggattactcgggtcgcgatcaaagtggataccatcagttgacacagcatgacagattgcatcattttttccatttccataggtttgataaaacaaatgaattttaccatcccgaactaaagcagcaggtgcacaaagcccattcttttcataaacggcattcttttccggcgttatttcaccgactttcgaccaattaaccaaatctttactggatgcgatgccaatgttagcaccagaaccagatacatccaacctcggtggaagcgtataatacatcaaataacgtccctgaaaattcacaacatgcggatcttttgaaaaagggactccacgacgagaagaatcttcatacatcatcctcggttgctggggtttacccagcaacgagaaaaacaaacaagtcaataataaaacatatactctcatttttattgattctaaatgattaattgccataaccaggattctgggtaaattcctccggattcgaaacatttgtcaactgatcacgcggtatcgggcgtaatacatgataatctttaaatttccctgcagtcataggactgatttcaggatcattcatacgctccatcaatttgtccgtccgtttcaaatcataccaacgatgcatttctcccatcaattcacgagctctttcatccaaaataaagtcaatcgtcacatcggaagacttaatctccatctccgcttcatgcccaggtacagcggcacggcgacgaaccacattaatatattcagctgctttctgagcatttccagacaggaatgcagcttcagcagccaacaaatatgtatcagccaaacgataaacaaaaacattacgcgatccggctgtccagttaacttctggacgcaggggatccaaatgtttcaccaaataagcatacattttataagaagtaaaacgagtattcgacggccattccgcattcggattctgctcagactggacatccatcagaggatcgatttgttcacgcatatattccggaagaaataccaaaacaggccaaatttctttaatctgttccggtgtccaaggttctcttggatcaatcatggccaactctccttttgtccaaaccttttcttccacttttttggtaaacggactgaaaacattctccgtcacagaattttccgttacattccaccgagaaataaaacaatcatcccaacgttgatctttcgttttgtcaaacaaacttattgcaaaatcagaagaacgctcacggctccaaggtctgccatactcaataactctctttacagcaggatgttcttccgaataggctgaacaaaagtacatatgggctgtattaccatctccatttaattccgcattttgcgtatacaaaacagagaaaaggacttccgaattatttttattattgatatcccataattctgcgtgcgatttaaccaacgaatatttaccagaattgatcacctgctcggcataattcaaagcttttttcaaatcgtcatcactccgtttcaaagtaagatacactctcgacagatggtgcatagctgcatattttgttatatgcccgaattcagatgcctggtaagtttccggcaagttttctacagcaaattccaagtctgtaacaatttgattccaaacttcatctacttttgttttatgtgcagtagtctctactgaatttgtcggcttcaacggcataggaatatcaccaaactgctgtaccagatgataaaaatagtgtgctctgataaataacgattctgcaagaaaacgtgtttttagatcttcatccaatccaggaatatcattattttccagactctcaataactgcattacactgattcacggatttataacaactataccagaaactcctgacatcagcatttgtcgcatcaatcgtccaattataccattgctcatgtccttgatgaccgatccatatatccgaaggaccttcacacatataaatcaagtattcctgtatatacattccccttaaggttgaatacaatccattgacaccattggttataccatctttcgtcgtataaaaattaccaacagtcactttattataagccgtctcatccaagaagtcgcaagacgacaaacatagcagagacaacgaacctatcaatattttatttagtattttcatattctactttcaattaatcagattattagaaacttgcatttactccaaatataaacgaggttaacggacggtggtctgtatagctattacagttttccggatccagtcctacataatcactctttgtccatgtatatggattttcaaccataaaatataccctgaatttttcactataaaactttttcgaaatctctttcggtaaagtatatcccaaattaatatttttcagacgtataaatgacagatcccgataagcataatcacttgacaccaataactcctgtggattagttatcgcaggtttcggacaagcattagaaggattatccggtgtccaaaaatcaacatccagatgattataacgagttgatccagcctcgtcagtcaatactcctaatagctgtccatacttctgacgtgtatagaaataaacattcaaatcgaaattcttataatagaatcctgtagaaagtcctgctgtccatttgggtattttattgaatgtatgcaaatcgccttcatcataaaccccattattatttacatcttctattttaggattaccaggttcacgtccatactttgccgcttcctcttcttctccatattgccaaactcctatatatttatacagacgttcaacgtagagaggttgcccaatgaaccatttatttcccggactatcttcctttccattgaacaactcgacaatttcattcttgttatagccaaaagtcaaatctactgtccatctgaaatcttttgtcacaacaggtacagtgttcaaggctatttcaatacccgaattacgtgtcttacctacattttgccaagtaaattcataccctgtattgatcggcaaattgcgtttcatcaatagatcacgtgtattacgaatatatccgtcaatagaaccactgatcctgttattcaagaaaccaaaatccacgccgacattatattcttctgtactttcccaccccaattgattattagccaactcggtaggcagatatcccattgccgactgctcagttgtcccgaaataatacacatatttacctaaagctccttgtgttgcatactcagaaattgctgtattaccggaattaccccagctcaaacgtaatttcagattagaaagccaatcaacttcccgaaggaaagactcatcattcatacgccaagccaatgcaacagacggaaagaagtcccatttattaccttttgccaaacgagaagagccatcgtaacgtccagtcaatgtcaacaaataccgatccttaaatgtataattaactcttcccataaatgacaacaaagcccatttacgcacagaagaaagacgtgtaaatacatctggtgcttcattcacattaaaccacgaaccgtaataaggcatatcctgtccagtcaaaccgaccaattctgctttatctgtctgcatatcatgcaccaacgatacatccaaactatgatcattcaataccttcttataattcaggacattcgtaaaagtaatctgttgctcgttcgtttttttgttttcagcagacggagaagccaactggcgagtttgagaagtagaactcttataaactccattctcgattgacgacaagccatatgtcaaacttgttcggaatttcaagcctttgattatttcccaatctgcaaataagttcaaaaggatacgggtacgtttttctttattgtctacattattcttatcagtatcaaacaaaggattcgaatgcaataccgtctgataccaaccgctattgtaaaagcgcatatctccattctcgtcataaacctccgttagtggatcaataactgttccatatttccagacactattatctccattattacgagttgtcaatgctaaaagagaagaatagcctaccgtcaagttctttgctaattccatatccccgttaatacgggctgagaaacgttcatatcccatattatcaataatactttggtctttattatagcctaacactaacatattacgattacgaccattcgattgattgatactgacattatgatccgttttatagcccgtaccgctaaacatcaaatcttgccaatctacaaactgtccggagttcaaggcttttaattgaatatcatcaaatatttccttatctgtctttccataattagccattcttttccagtctgcatatttttcaccgctcatcatatcataatttttgaatgacttggacacaccaacatatccgtcataactaacagacagtttagcttccttacgggcacgttttgtcgtaatgataacaacaccatttgctcctcgagaaccataaatagcagtggatgaagcatctttcaaaacatcaatcgactcgatttctgccggattgatctcatcgatctttcctccgaacggagcatcatccaccactatcaacggatcattgcccgcattgatcgaattatatccacggatcacaatggtagaagatgctccgggagagtttcccatcgtaatatccgcacctgcaattttaccttgcaatgcttgcataggatctttcatcacagcctgattctgaatcgatgaagaagaaatctgtgaaacagatcctgttaggtcacgttttttgacagaaccataacctaccacaaccacttcatccaaagcttgcgtatcttccttcaattggatgttcaatgttgtcttacctttactaaccgcaacatccttgtccaaatatccgatgtacgttatacttaatttggaaccttcggatatcgacaaagagaaattcccatccatatccgtaatcgtaccattagacgttcccttttcaacaacattcgccccaacaactggttcgccattttcatctttcacgatgcctttcacaatgatctgcttttgctgagtgatagatgatcctgcggcttccttcttggaaatcacaatcatcttgccctggacggaataagacaatccattatccaatatggcagatagcacttcttccaaggatgcatctttaaaatctcgcgtaatctgcttccgttcatttacctcgtctttcttgtaaatgatggaatactgtagttctttctctacttccgctaatactgtttttaaaggaacatttttaaattgccgggtgatccgctgtgcattcatggaggtggctccagaaagcatcaaggcaaggattaacgcccttcctacatgttttctatacataaaccaataaattaaagaattagatttaataatatattaacaattgcgctattgttttcgaatataaatatcccggtcccgccgctcataacggatcggaataatctcggataaagcttgaaagacatctccgacagtttcttcattgcgaagcgatacgcggaaagccatatctttttccaagtcgtctcccaaatgaatctgaacatcatatttacgggatagacggattgccagctcattgagcgtgattttatcatattcaactctgccttcggtccaggatttatattgagatgcctgaaccctctgacgggaaaaacttccattttgtttgtcaagactaagcaattctcccggtgcaaccggaatatgtcttcctttatataaaatatcgatagagccttccaataatgtcgttttggcagaaatatcttcggggtaagaagatacattaaactttgttcctttgaccaatacactatactggtccgttttaaccacaaaaggagttccatccgactgtttggtcacttcaaaataagcttcaccggttaaaaagacttccctgtttttagaattgaaattaccggcatactgtaaggaagaaccggcattcaaccatacaactgttccatccgccagtatcagcttgcttttttctccataggccgtttctaaagcaaaccggttatcggtggtttccgtattccgataaagatagaaactatatgttccactcaataatagaacacatgcaattgcagcaacagcgataaaccgctgcaattgcatgtgtttagtactaaacacaccattcagcgattgacgcacctgcatccggcgttgcaactgtttccattcattcgaaacttcaggaatcagtttataggaaagcatccactcctcctcccattggcggaacattctttcattagaaggtgcatcattcacaaaccggaaaagaatctcttcttcggagggagtaatgcgtccttcaaaataacgtattgccaactggtgattatagatctcctgctctttcataatttttgctttctatatgatgtaacaacccaaatgaattttacccaacccccttcctgaaaaaaattccccaaaacaaaagaaacaggacttcgttcattcggaaagcagccaagctaatatcgcgatatagacatccaacggatatttatctttaaaatgtgcggaaaagcgtgctaaggctttggctatatgtttttccactgcagtagtcgatatttggagagcatctgcgatctcccggtttttcattttcttaaaacggctcatctcaaatacttcacggcaacgggaaggcaaatcactcataacaagactgatctgttgttgcaattccttatacagaagcgtatattccggacttaggttaaagtcccaataataaagttcttcctgcccggccaccctatccaaatgttccagattatgctgctcgaccagttgcagatgcttcaaataattcagacaggcattcctcaccattgcgaaaagaagagatgaaatggaaacagcttctatcagatcacgtttttcccaaaatctcaaaaaactctcctgtatgatatctctgactgcttcctcatccgtcacaaaacgagcagcatatccccgcaaccgaggataatagctattgaacagaaattcgaatgcttcgccgtttccgttctttatctcccgaagaagagtcttctcgtctgtgaagtttttcataatgattatctattatgtttcatctccttattcttgcaattatagaaaccctctatatagatattcaaatctttgtctatctcaatgacggcaaaactattattttcgggaaggcttccttctatcattcctttcattgtaaaatagtggattccatgccgaaaactatagttcccggcatgatggtgcccttggataacggctactaccttaccgctttgctcaagtattgaaacgatctcttccgcattgccgatacaaagttccttgtcgatcccggagaaagtatccaacaattcgtggataaagatcacgaccggcaaatcgtctttcttcagttcctgccagagccattccttctgcccggccgggacaaacgctttcgtccaatcgaaatcaccggaatcataatcggaaccatcctcgttgcaattaccgtcgagcacgataaacttgatctggttccgtacgaaggaataataaggttttcctttcgcactcccgtaattgctcgtatgtgcgagaaattcagattttgagatactatccatatcatgattgcccaacacatgataaacagggccgtcgaaggtctgaaactttgcttctatctcatctaaaaacgacaaagtctgccctctttcaggaatatcccccatatccttcaagtctccaagttcaatcatgaaatctaatttccgcctattaaaaacgtctattgcttccgataactttgtgatggattgttcataatagcgagttccgtgtacattccgatgagcaaaatgtatatccgttaccaagccaaagcgcagtctcttttcattttcccgcgccaacaaacccggacaggataaaagcaataccccagcgcatgatctcttaaaaaataatcgtctattcatggtttatcagattgatcagggcaaatgtaaacaatattcccggagaattggataaaactgtttacctttgccttatcaaatacgaatctgctatatgaaactaaaagtaattatcctgcttatcagtctgttatccggctctatcgaagcccagacaattcattacaatgctttctcacacaacgattatgaacgtccccgtccgctattcgatgccctttcattccaattcaattgtgtggaagcggatttatggctaatcgacggcgaactgtatgtgtcccacgattcggtcgcccccaacccggatatcacattcgagaaactgtatctcttgccattagtcgaacggatcaaaaagaacgggggcaaagtatatccggacagcgaccgcccgttttacctgatggtcgattgcaagacagacggcgaagcaatgtaccccgtcttgaaaaagaaactgaaaccatacgaatctcttttctgtcatgaaaaggacgggaaactgcaagaaagtgccgtgttgttctacctgtcaggaagaagtccccgcaaagctattgccgccgaaaccaaccgttttatctttctggacggtacgatagaagatttagggaagggcattccggccgtcctaatgcctgtcattagcgataattattccaaatatatcggctggaaaggccagggagagattcccgctgaaaagctcgaaaagatacgagaatatatccggcaaacccatgcggaaggcaaactgttccgctggtggggcgcaccggacacaccactgttcaagaaactttttattaaagaaggggtggatttgatcggggccgacgacttgaaagcgttgagtttgattttacagaatccctaaaagagacagcgacttttgataaaatcgtcggcggcttttccggaaggaatgcctaccgctttcctaaaagatatgaaggtgtgtcgtaatacccgatgcgccttcttttttttcgttgactataaaaatcggctcatttttttaagctgcgatattttgaggatttcttcgatttatgtgttcgcagcatctaaatatagctactgtaagctcataaaacagtccagtcagccaatccataccttctttagccatttttgcacatatcttttttatattgaaggcaatggcaaagaaggaaaagtccatgaagaccttgtcctttccaaaatggcggaaacgtttgtaattcatattgtttttcatttgtccgaacacggcttccggttctatgcatctctgtcctctgtgtttcagcccttcctcggagcagagctgctctttggctttttgcctgtattttctgagcctgtgattcagttctatcgtcctgtttccttttgctttaaaacaacggcatcttagcggacagccttcacatctgacggctctgtacctggcattttcgctgacatatccggatgcggttttcacatgtctagtacctatcctccgcatcctttgtcccatagggcagatgcaaaagtcatgttcttcattgtagtagaagttttctgccttgaacggatccggtttgaatctcggccgctgctccatgtggaaatagttatatttgacgtaagcttccatgccgttctctgacatgaagcggtagttctcctcggaaccatagccggaatcggcaaccaccgtatgagccatccggtcatacctgtttgaaaaagattgcaggaaagggatcatggtcagtgtatccgtagggttcgggaagagtgcaaaatcggtgatgaactggttctcggtgccgatctgaaggttgtaaccgggcttcgtctgcccgttacgcatggcatcctccttcattctcatgaaagttgcgtccttgtccgtcttggaataggaattcctctcttgcagcgtgtccagatgactgtcgtattcctggagtttgtccctatgttcttccagctccttcagctgtttgcgtctctttttcagctcagtcttttcctccttggtggaaggctcgggaacctgttccagcacatgacgtaattctcccgccatttcggtcagcatggccggagtgaactcaacctcctcattactttccgaagacttttcttgggcgatgacatcgtctatctgccctagcaggacatgtatcttcttcatcaggcgctctcggttccgctcaaccgtttttcgccaaacgaaagtatacttgttggctttggattcaatctttgtcccgtcaatgtattccacgttcaggctgatgaagcctttggaagagagaaggagtacggtttgggtaaacacctcgttgatttccttcttcacccgattgcggaaacggttgatggtaatgaaatccggtttctcacatccggcaagccagatataatgaatgtcacgatgaaggagcttttcgattttccggcaggagtagacgttgttcatgtaggcatacagaatgaccttgagcatcatcttgggatggtaagagctgcggccgcattccttatatagcttcctgaaactttcaagattcaggccctcaaccagggcgtcaaccatgcgcaccggatcgttatctgcaatatcctcatctattctttgaggaaaaagcactgtttggttgggattgtaaggacgaaaatgtatctttgccatagtataaattcttatgcctaaagatacaaaatcttcaggttataacaaagccccagcttgtgaaagtcggggctttgggtataaaaaagaaggtgcgaattttgacacaccttcatactcttttgtcccctaccctataacctgtcgcgagataagtcataggctatattttattggatagaaacctaataaaacgacctcaaccgcttcaattaaatgttccgggcaatttcacgatcaccattcacctttttgagcatacgatttgtttaacaaggcctatacaaggtgaaggcaagtacgtttttagccttcacccctgctatttgccttcatcctgtctcgtcctgattttggttgactgtgtattaaaaaaatcctgttataggttgtctataaatgtaaaaaaacagacaatcctttcttaatcctaaaataagttaccttatcctgtttcactacaggacagggggcttttcacagccaaactcatcggccggggagcgcccaagcggcaaggggcagggccacctgtcccgacgagcgtttccggtctctgttctattttgttgcaaatatatcagtttaatcctgttcataaaagaatagcttgtttacgtttataaatagttttccattttctttttaaaggccccttcttcgcatgcgcctcttcaggtgtcaacatttccacactactgtgagggcgccgggtgttataaatatcgatcactttcctcactatatcccgagcctggccgagcgttgttatcatttctttattcaaccattcttcttttaatattccattgacacgttcagctattgcattctctctgggatctccgttttctgtcatacttatacgacatttaatgccttgtaaaattgagatataatctttgctacaatattgtactcctctatccgaatgatggatcagatcgcttcccgggggaagtgtttccaaggccatattcaacgcttttatcggaccggacatctccagggaatcctccagggcccaaccgacaatcttacgggagtatgcatctgtgagcaaactcaaataatagaatcttccttcgacattgcggacataagtgatatcagctacatataactgattggctgatagtggatcataatcttttatcagatttggatacttatgaaaacggttccatgacagagttgttaccggccgataaaccctggaatgtctgatcaacaaaccattgtcgcgtagcaagtcaaaaaacttatcgcgccctatatccaaatcaggatgtatcttggtttttaggatatgatacaacttacgaccacctaaaaccggttggtcctgacgcaggctgtttaccattttaaggattatttcatcacacaacaattccgattgtaactgtttttctctcttataataggcttgcttgctatacccaaacaacgaacaacaatcagggatacttatttccggctgattgtcatgaagccttttcactgcttggtgccagagttttttcggatatcgatgttatagtgttcattggctagttctattaggatttccatcgcacggcgatgagcttgctcatgcttcagttccttctctttatcctttaactccaactctttttgtttgagggcgcgttccagttctttgatccgtttggaaagatccgattcgttttctgtcatttttattgatcgctttttgagtttcagtggttttattgacactgatgattgtctttttgcctcaaatttacgaatccaatgcgatattaccgtagggtcgcttatggaatatttaaaggcgatctctttacggcttactcctaagcgatattcacctatagctgctaggcgaatctccaaaggataaggttcacccttgcgacgagtcaatgacttctcttttttcatctttgttgacttttatgaagtcaacctatttcaggacgagacatccagttgaccgaagtcgtttttctgccaataaaggagaaaaagagcagcaccttcaccccatgttccacttcattccataggcattttcgtttttaatttaaggttacacatttactttatatagataatcgtattatcgtcactgcgggaaaaagtaaaacgcgtactgcgttgcaacacctgcaaaatgaaatccaccccgtccgaaacacgacatttcccactacatttatagtcatacagacttttgttttggattacaatacgaatatcatacgtcttctcaaagcgtttcatcaaatcggcaaaacggatatcctcaaagcaaatcaatccctctttccaacgataatcatccaagttacggatcgattccaccaccattttacctcccgtccattccgctttctgcatcggagcaagccggatggaaggaccaggctccattttatttgttaactcaatggaaccttccagcagggcagctgaaaattcgcaatccgactccgcctcattcacccgaacattaaactccgtccccaaaacttttatatcacatttctttgtctgtacgacaaatggatgttccacatctttagatacatcaaaataggcttcacctttcaacgacacacggcggatatcctcactaaaagaggccggataagtcatttcactacaagcattcagccagacattcgtcccgtcggacagggtgaggttcgcccgctgccccggaggaacgacgatcttgttcatatccaatacaggagccgtttttcccacattattagatatgtatagggcagacactagcaatacggaaattgcagcagcgatcttcagcgattctctgataacaaaaggcaggctgaaacggtgaccggattgcaccatgctgctatttttcgtcttatgtaacaacagcacatcaaaatatttccgctcccttatcagctcttcccgattcttatcagaagcatccacccaatcgcaaacagcctcttcctcttcaaaagaggctgttcctgcaaaaaatcgatgtaatacatttctgtccatacgttatataagcacctctcgaaagcaaccccctaaaattttatccgaatattttcaccttcctttattttccggttgctgatcgtttttccgtctgcgataacggcaacttgcagttgatcgccaagacgcttcacttcaatatcgaatacttgattgaacgcgcaaatcttacgcaggttcatatgatcccactcttgcggtaggcggggagtaaagacaaacgaattcaggccagtcggacgaatgccgaacatcccttccgtaatgatacggcaatacaaaccgctttcggcagacagatggcgctggttgccttccggccatgcctcgattgcataagggacatgttcacccaacagacgctgggaagaatagaatctcaaataatcggtagccttctccgtctcaccgcaagcatacacgccacgcaacgcatacaaggtggagcgatcccagaatgtttcacttccggcctgcgtcagcaaaccgttctccgtccacaggcgcggagagaacaacgcctggatggtcgcatctttccgatcctgtatcccgaccgtgagcggaatgcagatccaagaacgcaggacatcatttccttcataatatttataggtatcaaatccttcgacggtcccgccgaaatagcggtcgatatttttcttcagggctgtagcctggcaagcataggcagcaaccggcttacctaaatccttccctaaataacctgctgagatcaaagcatcataatataaggaagaggtacaaagatttgctttccctgctgggaaacggttttccagttcatccgcatcggaagccacaacaccactcttgttcaaattgcgccgacaatattccaagcaccattcgatcaatggccacaacttttcggcttctgccttatctcctttggacaaagcataacgggaagcaccataagcgaccatcgccgcatcgccacgatcaccggctcctgcccaaacatcaatgccttccgctatgatcgagctaggcaacggcttgtattccggattcatgaagcgggcaaaatgttcatacgagcacagtgcggaacggtttccgacctcatatcccaaataagggaagaaagggttgatatattccgcctggtcgtttgcccagatagcagcatagtaggattcgcctccggggccatgcataaggcctcctttcgtatcgtaaatactttccgctccacggatttttgcaaaggcgaacattgtattgatgacaggatcgggcgtatccagaaccaggttatcccagaatccggcaatcaaatcctgccgggcctgtaattcccggtcaatatctaacgatagctcgcgctcatcctttttgtatccggcaaaagtcgcactgaacgtcaactcctcgccaggttgcaactgacgagccacctgtccgttgatagtcgaaactaatttatagctgccatccacccctttcacggcatctgtctcgacaacagagcgtgaagaagggatttccaccgatatcgcagattcacctatattccgtaaaatatatttttcacaaaaagccggattcgaaacggaaggaaacaagatacgtgtcaagccgagttttcccttacggggaagtgtgtattcgctctggacgaccatcgtgccgttcaacgtaacctcctttactttctcgttcagcaaagactgcccgtttacctcgaccatatccgtcacgttccaggcaaaacgacgcatcaagctagcatgagtattattcggaatcgtgcgtagcatcggccataccatacttctgttcagcataaaggcgccgtttgcatcgactccgtagcgaagcacggtcgaaactctcaacccactcatttcaatatgatcctcatgcggaacccgctcatccacctgccaggtaataccaccggcagaattaatagcccagcgatcggctgccgatacggagaggcagctaatccataaaaaagataaaaggcagtaaatctgttttctcatgttacttaatcaataatgtgtttttcaaatttcttttatagtaagcacctcaaaagagatatcccctaaaaaaatatcattttttctgaaatacttttgtttcacatgaacaaaacaatcgtcatataatccttcaacttcactttcaatatcttcaatgctttggatatgtggaactccacactcttgacggaaagcgagaaataggcagcgatttccgggtatgttttattttcatagcggctcatgataaagatccggcgggttttgtcggacatcattgccaatgcctcatccacgagccgtccggcctccgaactgaaaatttcctgaggatcgcaggcttcaagggtggcaatcctcagactattcacccgttgctgatgctcctggatacgttgttccacatcttcgcggacacgaagatgacgaaggaaattcagacatttatgtttgatcgcttccaggatataggcaggaatattcgaatcggaagaaagagaatggcgattttcccaataatacatgattccctcaacagcaatatcttccgctgccgcttcatcttgcaggtacgtattggcgaaacgcacaaacaatccgtggtaatcggcaaacaatttattaaaagcttttatctccgaggctgtttccataatgtctcttttcgccgataaagatagtacaaaaaacgctgtttccagactgttatttcagaaaaacaatctgaaaacagcgtttatatctcctctctcgtttatgcgaatcagaaacccatgttttcaaccgcttattttactttttcgaaccaaggcaggcattccagaggagctgtcacttcaatcgttttcggtcccttgaacttcttacccgtatcgtctacccatacaccttctggcagcatcactttgcgcgtgtgttccttggtcagtaccggggcaaccagatatctgtcacccaacatgaactgatccttgcaatcaacgaacccctggtgcggaaacgcatattccatatgccggatgatcggctcaccggtctttgcggcatgatacgcctgttccagaatatatgctcccatcttctcatgcagacgggcataatcacggcaaatcgccagatgcttttcatcgaggatgcgccaaggagccaccgagaattgcatcatcggcatcaaggcatgtacctggcagaaacgcacgatcagctcttgatcgagcttcgtctggtctactcccaggaaagaggcgaactggcctccgccgatcatatccggacaggcataggcatatcccagcaaaccggcagcaatcatatcagggatcagcaggccgaccgcattccaagagtaatctttatcacccagacgctgaaccagcgcttcacctcccatcttccatccggcacgatattcgttaaacgggaaatccaacccgatcttcgcccaataccggcacatatccactgaagtagccgacttatcgtaaaactccagttccggatcgttataatgaccgatatcaccggcatcaaacttgaaaccatccgccccatatttctcctgcatgccgcgcaattgttgtttcagatgttcggcagcggccggattgctaaggtcatagcaggcactataaccgttccaccacggaatgatggccgcttcattcgtccccctttttttgatcaggaatcctttctgctgaagctcacgaaactccgggctatccggactgacgaacgggcaaatccagaacatgatcttgaatccctgcctgtgcagacgatcaatcattcctttcggatcaggaaaacgttcgggtttaaagtcgaaattgccataatatttctgccagttgtcatccaccatgaacacgccgaccggaaaatcattctccaatacatgatccgcatatttcaggatatcctcctgattctggttatacatcagttcgatccaggtattatactgcggcatggaaaagaacaacggatccggcaaatcaccggaaggtgggaaatatttggcagaagcagccatataagcatccttcaacgtacggcccgccaataccggctccatcttctcataatcggaatacaaacgcaactctccattctctacctgaaaagaaaacggcttgtcactccaaatataccgtccctccgaagaaagcagaagcggcacgttctgattgttcaggttctcggcagagaggtcgaacaaacgcaagtcaccttcaaaaggcatcttcgatcccaagccgactgcaccgccccaccatttctctccttcgagagacgttattttcgattcgtacttgctcgcagcaaagcagggcaatgccaagagaaccaagaaaaggagacagattgatttacgtgtcataatatattcaatgttgttatgttatttgccgaatatttccacaaatatacgttttactgtcgaaatacaatctccttccggttcgctcgaataaacatttgttgctttcgtccagcgttcctcgattgcataaaagtcgatagccgccgtttttctgccatccaaaagccgagtctgataatcgaaccaggttttccagcgcatataatagaaatctttcaggataccattccattcgcgatgggcataatcgcgtaagccgccttcgtcggccgccaatcggttaccccaagtcgtaatctgtacacgggcattccactcgtacaattccttttcttcaggagtacctccgaggctgcgggcacgagcgatccaggttccaaccttaaattcaggacgcgttgccagcaattcgtcctgcaacagaatcaaacgcaggaaacggtcggaagcatccttatacaattttttgtcgccagcggcaaaagcggcctcaacaaccttctccgtaagacgtcctttctcggcgatcgcctggcggacgatatcgaccaaatcatactcgaaattattgtttcccttgaactcatcggctacagacaccatcatggcggcagcacggatcacattgttcagatcataatagtctttcatctccgaccagcttgaaacctgatacggatgttcggtaggacgggcacagaatacagattcatgagttccctgctgcgtatttgcatccggacagttatagatggaattgctcaacagtatccaagcgtcctgcaccgtgggattgctctttccgtaacgggcaaccgtatactccctcaaccactgatccttgtcgaaacgctgcggacgccaaggcagttccgtcaacagttcgaacatgaccgggttgttttcgctcccctccatcgtcatgccgactcctttcagcgttttaccgaacggactttccttcgccttatagaactcgtcgatcacgtgcttcatcttcccgtgtaatccaacgttcccaccatagttcagcaacatacaataaatccagtcatgctgtccgaacccgtccttccggtaccaagtagatgcaggatctccccactgcggacggctttccgcgaacagatccaacacgatcagatctcctgcctccaaatttccgatcatctgcggacgcgggttcgcctgccatgcctgagccacccagacggctttcggattattcttcttcattgcctgcataatggcctttccagctgcatccagatccacgccagccacacttccgccttcatggaacgggtccatactgtaatagtccgctttgccgtacagcttgttcatctccttataatataaggaagcgatctcctcgaaacgcggatctgtcggttgcaaaaatgccggacggcgatatccgttccataatcccggatcagagacattcaaacctaacttctcttttgcattatgaggaaccataccggagtatccggggaataccggttcgatgccatattcacgcatccgcttcacgatccgtttctgcaaagcgatctgctgcttataccaactatccggattcgggccgccccaaccttccaagttgttcatcaaccaccaagcctggaaaccgggaccggctacaaaatcgttgatttcttccttcgtatagcctaacttgctcagcacattgtaccaaacgccatccgccccgaccatcgccaacggcaagttaatgccatgcaacgccatccagtcgatctctttctcccaacgcgtccaatcccaaaaggccatcgtataagagaaggtacaatagttgaagtcatagcggtatttcatatccgtctcatgacgttccttctgcttcactgccggcaatacctccggcaattcggcctgcatgccattccaggaaagatgaattccgacatgatatttcagataccagttcagcccggtcgcgatactcacataattattaccccggatcacgaccttgtcacctttctggtcgagttcgaaaaaatcgacaggagatttcacctgttcaatcataaatttacgcgacgcacctttgtcgatacgttccagcaacccttcgataggggaagccgcttttacggcaagcgcaaccagcaacatgccgaggatatggatgattttcatttgacagagattttattcattaagatattgacgccatactttccgtcaggagacacccaccactgcgtatcgccgtttgcacaacggatcgcaaaacgattgtcatactgcaaacgggcggagccgtcgggaatccataggccgaggctgtacattccctttgccagaccgagcgaaatctgcaagtcggtagaaatcgtatgcaggagcggagtgcaggagctgtcgcccgtttcatacggttgccagtcattcacattcgcatccgtcaaggcgacatggcaaaccttaccggactcgtcaatcaagaccagatagacaggatgttcattaaacaaagtcgagaaaccgcggtttatcaaagatatttcgacaggattagcctgtccggcaagcaaaaccgccggagccgtcatctcctgcaactcgatacggtaaccgagatggtcccggatataatcgaatacattccgttccgctacagagccatctttcctgatgaaatacccatccgacaccggcatcttgttctcccgcaggaattctgtggaaacaggagtttccttccagtacatcatcgaatacttatctttcgtattcttttccttatagttatgaatcacgctaagagaagtgaaatgttgcaggaacaggcggcgtgccgtttgcaatccatcaatgatccacccggcttcaggattatcggggtcctcattcatgctccaggttccccaaggtaattctccgtcgaccggaaaacaaggagactcacgcacaatctgctcataagcaggcgtaccttctgacattccgccatcccactgatgctttttgatcacaataaagtcgtcatggaaagaaatccgtttataatcatcagaagccgtatccagcaggttcttatattcgggaacccgtatctggacagcccgtccttccggtgtcatccggcagatatgttgcaaaatagtccgtttcgtatcgtccgacttttcgagaccatgaaaagaactgtgccattctccccaagcaccgatcatgccagcctgtacaacctgaatcacatccttattctcttcaaggaaaggcttgagctgttccgtatggcgaatgatgtcttccaatgtaggaccagtagccgcccgccccaaaaactgggtttcataagcaaaacggaggaccgctttcttgcctaaggaccttaatttgtcaaagaaaatacccattgtccgaaaatcctctcctgtcaactcttttccgactgctcccgtcaaatagaagtaggtctgaaccagtgatacgctatcggaagcatagagctcggactgttcttccagataagaagtgatatcaggatattcttcgggagcccagacatagttcttttccgttacatccagtgccacttcaagtcggaaacctctttcggggttatacagcccttccattccagccggatcatccgcataaataccccggaaagtacgatgctgcaccccggaatcgcaagaggtgaaaaatccaagcgtcaatgcggaaaccagcataaaggtcgcaatgtttttcatatcaatcgtttttagttgttgttataatcaatgtagcctcctgccctttcagcaagtcatccggcagaccggtaatcttcccgttcacgataaccgttccggcatcctgaaccaagcgcaaagctttatcatccaacggttcccattccacaaactgctgtgttaccgtcccgtcgttataatgcacatttacaaaagaaggcgtgtataacaactcgcgtgtcacatgtccgtcaatatcgcgcaaggtagcttttccttcggatacctgcaagcgtgccggctcgatagaagtgatgcgtaactcattttccggtactgcctgacagccttcgggtattttcttgtacatgcggatatagtcgatatcgaaactcttcggatacgggacggaaggatcgtaagtccctgtccagccgtttttcgctttccgattgtcataaaaagagataatctggaccagcggataagtgatcgccgccttatgcatcatcacccgtatgccatccacatacacagtcacaccttccggtgtccagtcgaagccatatacatgaaactcttccgccaatttcttattggcgaaccaaggatgttccgtgtgatactggatagtcgagtctttccagctgtgtacggtggaccagatacgattgacatcagtccccaatatttcaaagatatcgatctcgcaactttggttcggatcatcttcaaacccgatcaaccaccaagcacaatgcaccccgcccccagcttgcatcttggcacgcatttcgtaatagccatactggtttatttgtgtagcttccgtcttgatcgaatgaagggctttccttttcggatcatagtgatgcataccggtacggctggcactcataaaacccgatatatacattcccttatcaaactcattttttgaattccggtcgatcgtcaaccggaccaccccgtctttcatctcatacgtcggtgtacagacagtccggtctttcggccaagaaggcagatactcaggaatccatttcgtccggtcgatctcttccccctcgaactcatcgtgaaaaatcaaacggtaaccctctttctccaacgggctggcgggataatcctgcgcctgtatgttctgtaagccgacctgcaaaaggaaacaggcaagaagtgtactgaatagatatttattgctcatgatatttatttgttaacggagagaaaaaaggccgcaaatgaagcggccctttctcaatttaaatatagactctaaaagaatcggatcaataacccggattctgaacgattttgcccttaccttcgttgattacagcttgaggcaacgggaataaaacaaactcatctttagtcgtcgtacaaccacggtctcttgcattctggataaactgtccgtgacggatcaggtcggaacggcggacaccttcgaaccaaagctcatgccctctttcatccaatactttctgcaagaaatcgtctactccttttacatcacccattgtatatggattcagcttggcacgtacacgaacttgattcaacagatccagtgcttcggaagttacggcatttcccttacggacaattgcttcagaaagcaaagtcaggacgtctgcataacggtaaacaaccaagtcgatctggctgccgtctcctgtagattcggggtcttcaccatattttacaggaacagctccagaataaaggttaccatgtttggcgatatcagactcttcattaaacaatacaccatcagtacctacatattcgccaaccaaaacagacagacggtcatcaccttcctcaaaagtacggtagaaaggccaagggactttataaccatcccatttctggatagaagcattcttagtcgggtagtttcccggtaaagcatggtcatgccacaactgaagatttgtacctctttcttccgtacaagcaaagataatttccttgttcccttcattttcaagcgtaaagatatctgcatatctgtccatcaatccataaccgtattcggctttcaacaattcacggccacattcttccgctttcgcccaattcttctcatgcatgtaatacttcattagaattgtatacgccaaacctttatcaaagcgtccgaactgtgtcgtacgggtaggcaagcctttcaatgattcagtcaattccgtttcaatgaaatttgtcatctcttcttgagtcgcacgcggctcaattacttcatccaacggattcttcaaatcttccagtgtcggaattggaataggcccatagaaatcatacaataaaaatgccagccaaccacggcctaaatgagtttcagccatcagtaaagccttcttctcgtcactcatttctacatttgagatacgatccaatgtcaatgtcattgtacccaaatatttggcataatccgtataattgagagtcgtataagaatgattcggagtccagttatgagttgtcagcggaatccagctatcattcacccaacaacaaacagcaatatcggttgacatatcaccaataacctggaaactgtgagccgtactgaatacaccgctatattccgcactacggaaaggagcataaacacctcccacaacaagcgcctccgcatccttttcattcgtcgggaaaaaatccggattgatcgcatcatatctttccgaatccaaattagtacatgaggccaatgcgcaacagcacattactgtatataataatttcttcatgactttatctttatttttaactgtttatactattagaatgtaatatccaaaccgaagctgtaagtacgaacattcgggtaagcccattgcaactgagatggagcactttctgaacttgaaatgtcagtttccgggtcaagacctgtatacggagtgattgtaaacggattgttcacgtcgaaatacacacgtacgttagacagaatatgtttgctggtcttaataggaatattataacctaaagtaatgttacgacaacggatgaaccaagtcttttcataataatagtcaccgactccataggcactttcagtctggaaatatccgggtaacgtaccgttcggattgctggaggaccaaagatccgatattgaagtaggctgattataaccacggcgcaagtcattaacgttattactcaaccattgtttcttataacttccggcagaaagcttatcaaactgtccatagaaataaacattgagatcaaagtttttccaacgcaaagtattattaaacccaaataaatatccagggtcagcagatccgtaaatcactttatctgcatcatccaacttaccatcaggctttccggtcttcatcggaataccatgcttatcaactttaatggaaccatcggattcataaacatatccgtcaatatctttgatcttcacctgtccgggtaatgcaccgggcatatggtcgatcgtttcacctacttgaaccaaaccatctgacaaataaccggaatagtaacgcatccatccgttatactcatcataagcattcggtttccatttcggatcacgttctttccacttgtcacgatagagagagaatgtcaagtctgatgtccattcaaaatccttattacggatattagtcgtattgatcgtcaattcaaaaccctggctctgagtcttacccacgttcgcaatgattttattcacctcgttataagacagcaaagtctgttcattcaacaaatcggaaacgactttatgataatattcagcagttacattgacacgtccatccaagaaacctaaatccaaaccaacgttccattcacgggctgtttcccaagtcaaaacattgtttccgagttgactcaaatagacaccattgatcatggaattgccaaagatattattgttacctactttataatagctataagctttatctcctacgttggagttacctgtttcaccatagctcaaacgtaatttaccattagacaatacatttctcaaaggagccaagaactcttcttccgtaaaccgccatccggcagcaactgaagggaagaatccccaacgttcacccgaagcaaaatttgaagaaccatcggcacgcaatgtcgctgtcagcagataacggtctttaaacgtatagttcaaacgaccgaagaatgaagccatacgagatttggttgcactcgatcctacagtcggacgttttgcattacccgcgcccaagttgttatacaagaaaccgtctgtaatgaagtcattgctttttcctgaaaacatttcgtatgtaaacaactgataagaatgaccaaccaaagcgttgaagttatgatcgcctacctgtttcgtataattagcagtcaattccatcaagtagtcggaattatcaccctgcgcaatagaggccgcaccattttcacgttgtccataaagcgttgtcgttggcaaatattgtttcagtttctgatagttacggtcgataccgaaatttgctttcaacaataagccatctatcgggcgaacttcaaaaaatgcatttgccaataaacgctcttgagtcgtcttatctgtaatgtccagcaatgaaacaggattcggcaagaaagaagcatcggagttcatcgaataattgccattctcatcccgaatgggcaaagccggattaaactgagccgcagaaaccaaaattccggcattctcattctggccactacctaaaggcacgttgtcatattcattacgtgtcgccgtcaaattaatccccatctttacatatttgctcaacttctggtccaaattggcacgaagagagtatcttgtcattccattatttttaatcacaccatcctgattaaaatagtttccagaaaccaagtacttcgtattatcgttacctcctgttatagataagttatgagaagtctgaaaacctaaacgggatatttcatcaaaccaattcgtattattagccggattggcaatctgagcatctgtataaggcaatgtcaaagccggcagggaagggtctgtcgcctcttttcctccataaatgccaacaccgttcgtacgcatccattgttcacgagtataatcgtttgttgcccgcataaaaccggaagcgtccaacatctcgtaagatttggctatctgctgtacagaagccgatccggaatactgtaccttagccgccccgctcttacctcgttttgtcgtcacgatgatcacaccgttaccggcacgagcaccataaatagctgtcgaacttgcatctttcagcacttcaatagattcaatatcgtttggattgatagaagccaggatattatctttattacctcctgaatattgattaccactatccaatgaacccggagaattcacaggaaaaccatcaataatgatcaacgggtcattccccgccttatcagaagaagcggcaccgcgaatacggaaagttgattgtccacccggctgggcactaatcgtgctgacctgcaaaccggcagccttaccagccaaagcatgactaactgtagacactgttgccacaggagtgtcatccatcttgacagatgcaactgcacctgtcatatccttcttcttcatcgtaccgtaaccgacaacaaccacttcttccaaagcctgtgtatcttctttcaacagaacgttgatcacattctggttcttcacaacaatgtcctgagggatgtatccgataaaggaaatctgcaaagtcgcgttagccggaacttcgatggaaaagtttccatccatgtcggtagtagtaccgttagtcgtacctttctggataacgtttgcaccggcgacagggccgaatgcatcgcttacagtaccggtcaccttacgattctgctgcgtggcggcggtagaagccggagctgcctcggaagtcaggacaatgtgacgatccttgatagtgtatttcaaacctgttttagcagcaatagcatccaacacagtctgaatattagcattcttttcattgatagagatcttttcgttcttgttgatctcttccagattatagaaaaacaggaactcggactgcttttcgatctgtttcaacactttttctaaagtttcattcttagctgaaacatttagagtagcagtttgcgcataggtggaagcaaccacgcttgacagacaaacagccaacattaacacggttaatttcatgatttttatagttcttttcaggttaagagaaacaactatacgttgattattcatacttttgaatgtttttaagattaaacatgatcccacggcaatgggagtttaattgttcacactttcagaagagaagatccggcaagattttctcttctttttggtttaagactaactggtgttcatatttcctactaagattagcaatttgtttttatttagatttctgatattgtcacgtgatgatcgtcgatcttataccggaccgggattgacagatggataatctccatgatgtccttgatactctgtccccgatagaaagtcccggtaaatgtccggcgcttcagtgcttccgacttaacagtgaactgcacgccgtaaacatggctcaaccggtacagaatagcttcaagactttgttcgggaaaataataatatccggtcgtccacgaaacaaaccggttggcgtcgacctgttgcaggagggctgatcgcgttcttttgttatagacaaactgttcgttcggctttaagaccgtaggatgtaacaggttctgcgtggtcagcaggacagaaccttccagcagtgtcgtagtcaggagcgaatcggtcggataagcggaaatgttgaacttcgtcccgagtgcttcgatagattgttctttggtcttgacaataaatggcttatctttatctttggctacttcaaaataggcttccccttccagttgcacgatacgttcggacttaccataacgggaatcataagagaaagaagtccgggttccgagactgacgcgggttccgtccggcaaaacaacaacatccgcttcaagcccgtctccaccgacataactggtaatccggtcgtcatattccctcgaagaaaagataaacacagtagaagtaatggctgcggcaaacattgccacagccgcataagtacttatgcgggtcaataaggaatatcttttacgctggcgggactttctcttatcgagaaggcgaagccagctatcgtgtatttcagaagcaccacgggaaggagcgcaggcttcataaagtgctttggtctcgaaaaacaattttttgttgtctgcactttcattcacccacgcataaaaatcgtccaaagaccgaccttgcagccgtccttgcaaatacccgatgattaattccgaatgttcgttttccattttcacttaattattagatgtagatacaaagtcgacacatggttaacttggttcttacatatacacaacgaacgggaaagaaaaaatactcacaagaaaaacaatttttttcgtcataatccgggaattgccttcaccatgtgtgtctcgtcctaatttgggttgactgtgtattaaaaaatcctgttataggtagtctataaaagtaaaaaaacagacaaaccagtaaatgagtcggggggacgaaaagtatcattgagtggcaactgccatacttctatcgtcaggctataaagtcatagagcttttgacctacgtcgaatacctttttgactaaggtcgaaaaggcttttgacactaggcaaaaaggctttcgacttaggccaaaaatacaaggagctataatacaggtcttaattttttgtatattaggacattaaaaagcttctataactcctttatttttcacttaagagattgttttgattctttcgtctcatgaattaagatggctttggtcagattcgtcgctccaatgagtgaaagcagatctttaaggtgaaggcagtccagatgcttgccttcacttttttacacattgattttcaacgtatagcaagacagggtgaagccaacgcgcaaattctttataaaagaaatatcagtaggaacagattcgaacagttcttacgcagataaaggagggaacgataaagctggttctcgaccgtacggacagagagatccagacgttctgctatttcggccgctttcagaccttcgagataggacatacggaagatttgctggcttctttcaggcagttcggcaacctttttcatcagcagatcgagcaaatcctttcgcatgaaaagttcgtcggatgcctcaaagaagtcaagctcttccaattttaactgaagggcgcgatgatcgatgatctcctgctccatattcatgcggcggagacaatccaggcaggcattccggacggagacataaagcacccgtttcaggtcattctccggaaggcggaacacctgcttgtcccacaacttcaggaatacatcgtggacaatatcttcggcaaagaaaccggaaacgaacttctccgcaaagcgcatcaacatcggggcatactccgtataaatatgccggtattgatctatgtccaaagatgcattccccatatttgcaaatatagaaaaaaaatctaattattcattaacaaacacttcatgtacacccggttcatcgaattttatcggttcgacctttccggtgacagcattcatacattgaactacatcgtttccggtagtctggaccttgaccacccagccgttctctttcttgcagacagacaagatatccgtcgtattggaagccggcatgacagccaagccgtcagcgcaatggatggtttcaatatgataacggcgcacaacaaccggaaactttttacctttatagataaaggtggccggatgctggtcttggtcgctcgcccaatcggtattcaacagatagatcgtacggcggtccgaatgatcccaaaccgtgaaaccgactgaaggagccgcctccatccagccttggcaggtttcctcaccggcagccttggcagcaatttctttcatggcttccacataatcagctttcaacatcgtttcggctggataggctttctgggggaaatagatgatttttcccgaaccgcagacgatctccgtcttagtggtcagttgccggtaattttctcccaacatctcacggataaccgcatcgtcggcagggaaacggaccggctggtcgggctgcaactcttcgttcagatgggccgccgtgagcaaaagcgttccgcccttgaatacaaaatcgcggatacgcaggaagtcattcgcgtcgtaactgttccatccgaggaagatcatcgccttataccggtccatcacgtcttgcggcgcttcgacaggcagcaagtcaaccgtaccgtaaggggtggaagtgaaccaaccttccggcccgcagccatccacgatattgtccggatagaagacattcagcagatcgaaactctcgcatgccttattaaacttccatttatcacccttctgcgaccacaggctgccacgaccgaacgacttccaggcgtcgttacgcccctggatcacggcaatattgcttctcaagtcgccacggcgggaatgcgtttccacgaaatcgagcatctgatgctgggcaaacaagtgttccttgccggaaacggaataacggtcgttcatatattcatccgtccacaaggcctcttccgtattcatatgggaagaaccgtgcatataagcaacggccagcgacatatacaggcgcagagaatgtttcggatcagtaaatggccctgagccccattgcgtggcatgaagcgtcccgtaaagcggacgactgtaggcgcgggatgcaccacgcagggaagagagtatgatttcttccggcccgtacatctgttcggcccccagccagtcgtaaccggcctgatacagatagcggaacagcgtggacggtcccgtatggcgcgtgctcggacctttggaataacggaaattggcaacgagcttgcgggcgccgtcggccatgtccgtcaccccttccggatcataatggataaagacaccgtggtcggtataaatcggacgatgtttggcaaagattccgccataagggcggttgcgtgccgccatatcggagaagactccctgatactggaaatgctgccagtaatagtagccgccgtcattctcatgcgcctgcttgccacggaacatcggggttgccaatgtttccaaagaaggattgatccggctgcctgccagcgtacgtccttcgacttgccaggcgtacgggatcttcaactggtccagcaaccgggtgtaatggccgatgacggcaggatcagctactcggaaaccgctccactggtaggaaggacggaactgataccagttaccgatccggttggaaacataccatttgaagaaataatcatacggcgtatattgcttgtcgatatagatttcgtcaccggacgaaagatagatctgctctgcctccttgtcgatcacctggcggatttgcgcctgttccgtacggctgccgtcgtcaaacaccagcgggatggcgtgaccggcctcgcctgcacgcatttccacgacatgtaggccggggatttcaaacaggcattcctgctcggcaggagtggcagcaccgtttgccttcactttgaggctgacattcggcctgttcgtttctaccaatataccgaaagaggcgtttttggcaacatattcaggaacggaaacgacttcaaaatcgcgtgcggtctcttcgatgatctccagaccgcgcagttcatacggataagcagcgcgatgcggctctttccggagcgtcagcttcatctctccactgccatgcaaggaagacggaagcgggatatagaagtccgccacattagaagcgcggtcgaagatgtttccttcgaaaagcgtctccccgttaaattcgagcttccacatcggccagctgcgggttgagaggttacagccgatccagtagttgtagttgtccggtttttgggcaaacttggtgaacggtatggagcaaaccgctttcttgttttgtatcaggcgcggagcttccacccaacattcgccgctgaaatgcgtcccgccgatacgcaggaaagcacaagccacattttccggcaatgtgaatgtctcagacaccgtctgatattttcccgtaccttccgggaccggcatgtaaagcacggtatccggcttgtcatagatatcgtcagccgcccgtcccagtttccggtagaacaattcgatctcgactccgaaatcaccattcccggaaacagtcaacccctgtttcttcacgaccggcagcgttaccgtcagttcacccggcttcagcaacttaccggaaatgcggtaataggcatggcgctcgaaattatcatcttcgcctttgaaataaagcgaataacggtcctttttacggatcaccgaatccaagttgtcgtcaatataaaactcggaccggcggaacatttcttcacctctgttctgaaaaggagctggcatcttcactcctccgatcacacgcaagaatttccgcgtcgggattccggattgtccgaaggtaacggtttcggagatactctgatcgggttggagcagatgtgttttttcacttcctgcgggagtaaagacgaccgttcttgtctctttccaggaagatgcagcgtatgcctgaagtacggcaaagacgatcaggcatagggagatacatgtttttttcatataaacttaatacaaatgtttttcgttcaaatcactttccaaatgtacgatttatttccgtattattattactcgcagtttttatgtacttttgtagatataattataagtacctaagactgaaaagatgattgttgtaagagacacggagacattgaaagggaaaaggctggtagccactatcggctttttcgacggagttcatctgggacatcgttttctgattcacgaactgaagcaggtggccgaagccgccggattgccttccgccgtcatcacgtttcccgaacatccccgtgctgtcctgcatgccgactatcagccgaagttgctcaattcgttcgaagagaaattgaaacatttggcttccaccgggatcgactattgtatcgtgctggacttcaccctcgaactatcccgcctgacggcaaaagagtttatcactaccgtattggcagaccggttgcatgtggacacgttgctgatcggctacgaccaccgtttcgggcataaccgcgaggatggcttcgagcagtatgtaacctatggcgaaacttgcgacatgcgggttatcaaagcttcgcaatacagcgaaggagaggcggccgtcagttcttccgaaatacggaaactccttgcggaatgccgggtggaggaggcggctcatctgttgacttatccttacgggctgaggggaagtatcgtcagcggttataaggtcggccggaaattaggtttcccgaccgccaatatccaagtggacgagcctttcaagatcattccgggcatcggcgtatatgccgttcgggtatatctgaacggacagcgttacaagggaatgctgtacatcggtaaccgcccgaccctggacaacggggacaacatcacgctggaagtaaacatcctcaacttctcaggcgacatctacaataacgaaataacagtcacgttcatacaacacgtacgaggcgacatcaaattcgacaccctcgaccagctgatcgaccaactgaaaaaagacagggagacggtggatagaatattaacggaataaaacataatcatgtactacgacgcaatagacctattaaaagggatgatttcacgtccttctttcagcagggaggagggagaaacggctgattttctcaagcagagctgggaaaaagcagggtataaggtgaaccgcaaagggaataatctgtggctgatcgctcccggttttgatctggacaaaccaactctgctgctcaactcccatatcgacactgtcaagccggcttcgggctggacgaaagatccgttcaatccggaggagacggaagacgagcgtctgtacggccttggcagcaatgatgccggcgcgagcgtagtctctctttatgaagcattcagggtgttatcagggaaggaacaaccctacaacctgatcttcctggcttcatgcgaagaagaagtttccggcaagaacggactggaaagcgctcttgccgaccttccccctatcgcattcgccgttgtcggcgaaccgaccggcatgcaaccggccgtagccgaaaaagggttgatggtactggactgtgtcagcaccggcaaggcaggacatgccgcccggaacgaggggatcaatgcgataacgcttgcgatgaaagacatcgaatggttcaacacctatcagttcccggaaaaaagcgatttcctcggaccggtgaaaatgagcgtcacgattatccacgccgggacacagcacaatgtcgttccggaccgctgcgaattcatcgtcgatatccggacaaacgaattctatcccaacgaaaaactgttcgaactgatcaaatcgcaggtcggctgcgaaataaaggcccgcagcttccgcctcaactccacccgtacagatttgcaacatccgttcgtacgccgtgccgtcatgatgggaaaagagcctttcggttcgcctactttgagcgaccaggccctcatgcacttcccttccgtgaaaatcggaccgggaaattccgcccgttcccatgccgccgacgaatatatcggcctgatggagatacgggaagcaatcgatatgtatatcaagctgctcgaccaattgacgattgacgattgacaattgaaaaagagcaagatcattctaccgcatcctctctttcttcaaactttcaattaatatgagggacctcttcacaaccatcggcacacgttacctaatcgccatcctgaacctggcactgatctttgtcaatgccaaggtattgggtgtcgaaggagtcggactggtcgggctgattctggcgatagtaggaatcgccaccatgttctgcggaatattggcgggaaatacgatcgtctatttcatgaaccgctattccatgcaagccgtatttttgccttcctactgctggacacccgccggagcaggcatcgcttgcggcagcatggccatcctcggagtgcttcccgaagggcacgctcttgatatttatattctttccaccctgacctccctcgttgccgcaaactcccgtttcctgttgggaaagaatcagatttttgggttcaacctgacctttgtcttgcaaggaggattactattttttgtcttattattcctttattacggattgaagatacagaacgtaaccgcttacctgtggggaatgtatttcacaaacggcatcgcgtttctcgtcagccttttcctactcctgccgtttctaaacaaaaaagaggcagatccccggaagggacgctcccaatacgctcttttgaaagagatgtttgcttacgggctttggggaagtgcggacaatattgccgagatcctgactacccgcctcaactatttcctgatccaacggtttgccgggttgggaagcgtcggactgctggatgcgggaaccaagatttccgagagcgtctggcatatcaatcgcagcatcggctttatcacatacagccgcgttgcccggacacataaacccggcgagcaaaaacaaatcacgctccggttcttcaaactaactttttgtgccatcacacttgcgaccggctgcattcttctgataccggaatggatctatacggactatctgttcagtgccgagttcgcagggatgcacaacgtcataacagggttgtcggccggaatcatagcactggcctgcaacagcatactatgccaatattttaccggaagcggcaaaatacgttacagcacgggcagttcttttgtcggtttgataagcctgcttgtttcgggctacctgctgatcccgcactacggagtgttcggatcggccatcagttccagtatcgcattcagcaccatgctggcattctccatgattattttctgcaggaaaacaggaactcgcccaaaggactttctgatcaataaagaggatgtgaggttcgcactccggaaactccggttaacacatgacggagatcagtcctgacagccctgacacacctgctacatctgtcgtgacgcgcccccggtcagcctcaatgcgccttttcgtcaatccagccacggagccggattcagtttcgtcttttctttccaaagctggaaatgaaggattgtggcattgccgtcctctgtatcggtaaagatctttccgatcgcctggcgggtactcaccttatcgcctgccttcacatagacctggctcaagttgctatataccgtcaaatagttaccgtggcggacaatgaccgaattgttatatcccggaacaacgaacacacgcgtcacctcaccattgaacacggcgcgggcatccgtacccggagcggtctggatgtctataccgctgttattcgtacggacatacttcaattcctggtgctgctgttcgccgaaggcagcgacaatcgtatggcggccggacacaggataaggcaaacgccccttattgcttgcaaaatcatcggataagcgcttctcggcctttgtcatggcatacccgcctttggtgtcggcgacacgttcttcgcggaccggatccgcctccggttttgtttcagggactttctttcctgaagcagccgccttttcacgtgccaaacggttcctttcagcgcgggccgcccgttcgcgggcagctttggcctcggcttcggcgcgggcgatttcttcggctatctgcttttcgatctggcggttcaaggcatcagcctgctgctttttctttttcaggtcggcctgcaactgtttctgtttctggtttaactgctgcacctcttctttctggctcgattcctcggtctggagcttacgactttcatcctcccgcgcacccaataaggcgttcttctcggcacgtgtcttttccagttctttctgcttgccggcaatttccttctgcttaccgataatttcggatgcctgcttcttctgccagtcggcatactcgcgaaggtaacgcatacggcgaagggactgggcaaaattgtcggcggaaaggataaacaacaacttatcctgcgaactgcggcgtttgtatatgctttgaaccgatttcccgtaattctgccgcttattccccaactctctttccaattgggaaatgttccggcgggaagcggctatctgcttgtctatttccccgatctcctggttcaggaggctgatgacctgtttacgggaaaggatctgtttggagagcaggttcagccggttcagcgagttacgcgccgtctgccgcgtctcgtccaatagatggctggtcatctcgatctcggcaagtgcggctttacgctgcttttcgagttcgcgtactcttgccgagttctgtgcggaaacagaaccgaccgacagcatgaatatgacgaaccagaagtatctcatcttacattttattactactcaaagatttgatgatctgagacaacgtgatacgtttatatttggcaggaatggaaaaatccattttcaccgggacatccgtctgcatgcgggagaaatacaacgtgactcctccttgcgaagtaccatctttcatcacctgcacatccattctcatcgggaaaggctgtccgtctgccaaacgaaaatcagcataatcccattgcaaggcgtaacggtccgaaggttcggaaatacaggttgagagaatcttctcctccccgtccgccataaaggtgtacagcaaccccatcacgtcttttacctgtatttcggctgcgggcccgtcctgcttcagcttaaagcggttgtacagcttcgggctgatcccctgctgtccgggaaggaacagacggttggtgaaaagtgcctgcagattataaaaattgaactcgatcggtgtctgccctttcaggttggcgtaattgtcagccacatagcgcttgttcatacggtcgatcacctttacgctgtccacactgatctcggcgcggaaaacctcgatacctaaaaagggttgcacggacaactggaaagcactgtcttttaccatcttcagatccacacgcgaactcatattgttgcccggcaggttcaggtccacgttcaggcgtgcggtcagggtttcatacttgaacgcctgctcctgcataagcgtaaagaactcgttatgcgctttcgccccgcccgcttcgaccgtaccgaccttcttggtcgatttacaacctgtgaacgacagggcgataaaaaaagccagcgcaaaggcaaggcttatcttattcattcttgacctcctcttctatataggttccctctgcgatcttgcgatccagcacatcgctttcttttcccatctccttcgctttcttccattgttcaagcgccttttccttatcgccgctcatgaagaggatatcgccgtaatggtctaccagctcggagcttttggtcgtatcgttagcaagtgcgctctctatgtatatcttggcaagcgtatagtttccctgtacaaagaatatccaggcatacgtatcgagatatgtcgaattgttcggttccagtttgactgccaatgcactcatccgttccgcctttttcagatctttcttttccagcgagaggaaataggcgtaattattgaggacgaccacattcttgtcattgtatttcagggcttcgtcatacgctttgtaggcttccggcatattcttgatctgatagtagatatcacctatctgcccgtaaaaatcggacttcaaccctacgttcgtctccgggataatctccaggcctgccttgtaggtatccagtgcatcctggtacttttcctgctggaaataagcgattccaagataaaaataatactccggcgcatcagggaaaagctcctggcaacgggtacagatacggatcacttcgggaatgtcttccgacttcaacgccaggttcaggagttgttgccaggcagccgcatccgaaggttccatctcggtaatcagctgaaactggaaacgggcctcgtcagtctttccctgcgtaatcaacaggctaccgtacatctgtttcagatcgatatcttccggatgttgttccagtaatgtctgaaaaagggcattcgcgctctcggttcccttcttcgtctgctgtagtttgagaatatagcgggacaggataccgactttcgtatcgacatccagtttttcattcaccaatgcattgcgtatctgcgtctcggccgcgtccttatttccgacggcttcataatagttcgccatcgagacaatgtaatagggactttccggatcgatttcgtgcgccttctgataatatttcagggctttgaccgtatcgttcttttccaggtggagatcacccaaaatgatctggtagcgggattccatcgggaacttggcagcaagcttttccacttctttgaaggcgttatcggtctgctccaacgcgttatacaatttatatttctgcatcgaaagcgcttcactcatgccgatagacgattcgagggcgtcataagcatcgatggccttcccgatttcaccttcctgcgtaagcgcatccgccaggtaatagttcaactccggttttccgggataatcttttaccagcttctcatactcttccgccgcttcgccgaacataccgaggttacggctcattgtcgccaacgccagccggtaggtaaaattatcggaactgtaagccaccgcacgccgcaacatctccagcgacttttccggacggttcagttgggcataaaacgaagaaagttcgtataagacagccgacgcagtcgagtcgatcgtcagacaatggttaaaggcatcataagcggcatcgaattttccggctgtcttcaggttcagcccttcgtagaagaagtaatcgaacttccgctgatccccggcactcactttattcggcttcggcgacatttccaccttcgcatcctgatcctgcgccctcaatgattgcgaactcccgatcaggaataatagaaaagatatcgagatcagagactttagcatccctcccatattttttaattcttaattcttaatttttaattatttccccgtgtgaccgaagccgccggctccccgttcggtgtcgtcaagaccttccaccgattgccaaacgacctggctgtgagtcgtgatcaccatctggcaaatacgctccccgtcgttgacggtaaacggttcggatgagagatttatcaggattatgccgatctcgccgcgatagtccgcatcgatagtgcccggcgtgttcagtaatgtgatgccatgtttcaatgccaggccgctacgggggcgcatctgtgcctcataaccttccggcaacgcgatatataatccggtcggaatcagtttccgttcaaggggtttcaacactaccggttccgccagatttgcacgaatgtccattcctgccgacagcggagtcgcgtatcccggcagcggatggtgtgacttattgatgatctttacttccataaactcttttatttccgggcaaatttacacaaatatccctgattaccatctactggcagttccattattctttaaattatactaagcacgcctacatgcatctaccccggagtactttggtccccttaaggtgctttttctttaaaacaagcaagaaaagtacggaaaacaagcggaaatgctcgcaaacatccccatcttgcacctttcaacatccgggtgtatggggcggctacacccggatgtttctgctccggacatccgggtgtccggaaacagaacataccaactaattgattaatatatacttatattgcaaaacaaagactatgactttcagaaaaccggtgatacataagtgatagacaaatatggtatctatcactcctacgcactataattatcaaagctcacatggtaaagtgtgatagagtgacagaggattccgcaataacagggtatgtaaccaatccctgttttcctcttattctcctacctttatttccacgattgcatccggcaggccttccgccgtagctttcaaccggatggttcctgccttgcccctgttttgtacgaccgccattgcttttccgtagaaagcgtggcgttccggtttcttaaggctgacgggatcattctgatctccgttatctgtcccggcgataaagccgtccccctcaaccgtaaagcgaagcaggttgtcggcatacggcaccaagtttccgtctttgtcctgtatttccacggtcacgaatgaaagatccgtgccatcggcgtgcaaggcggaacgatcggggatcagcatgatccgggcaggttcgccggccgtacggatctcacgtgtaagcacttccttgccgtccctacgggaaacggctttcaacgtacccggcgtaaaaggaacccgccagcagacatggaaagcatcgtccggcttgctcttgacacccaggctctcgccgttcaggaaaagctccacttcgtccgcccggttatagtaggcccagacatcgacagtctctccctttttccagttccagtgcgggaaaaggtgaagaaccggcgtgtcggtccattcgctctggtacatataatagacatctttcggaatacctgccaagtcgacaataccgaagaaactgctacggctcggccaccagtaaggtgtcggttcacccagatagtcgaagcccgtccagataaacatacctgaaacataaggtagccgcttgacttcccgccaagtcacctcatggggcgagccccaaggtacatggcagttgtcataagccgagcaaaggtgttcgggacgatcgaaccgttcccgccaggtgttcggccagacatacatcgaatcggagggcatctggtagtagccgcgtgtcatcaaggcggaagtagactcgcttacgattaactttttacccggaaaattctgcggaaacggttcgtaattcttttcgtgatagttgaatcccaatacatccaatgcattcgaacgaaagatcaggttacccggtgtcgcctcgttgttggctgcagtgacagggcgcgtcttatccaggcgcttgacgatcgccgccagcgaatgggcgatcaatccctgtacgctcatggcggtatcggacaagatcttgtcatccaccggatggcctgcattgaggatcaggttggcggcttcgagactgagcgtgtcggcatcggcatgttgccattgctccagtacttcgtttccaatgctccacataaagacggacggatggttacggtcgcgtaggacttggtctgtcaagtctttttcatgccattcgtcaaaatatcgggcatagtcgtacggtgatttccgtttccgccacatgtcgaaagcctcgtcctgtaccagcaatccgatccggtcacagatgtcgagcagttcgggtgccggcgggttatggctggtgcggacggcattggcccccatgtctttcatcatttgcagttgacgttcgagtgccctcggattgatcgcgctaccgagacaccccaggtcatgatgcaggcagacgcccaatattttggtcggttctccgttcaaggagaatcccgtatgctcgtcccaatcgaacttgcgtatgccgaatgtagttcgatagcgatccgtcagtttattgccgactctcacctcggttatggcggtgtacagataaggattccggacgctccatagttccggatagaacatttctatcgtgtgtgtaacggttttctttcctcctgcggctatctcggccggggaggatatccggtagagggtctttccttccttatcttgtatcagggtagaaacttccacggtcacatcggatgcctcgtttttcaaagtcgtttcaatctcgaccgtactcttgtccgcattcatgaccggagtagtgatgtttgtcccccaattgtccacatggacttgtccggttttcaccaaccatacattccggtaaatgccggaccctgaataccaacgggaattaggctggtcgctgttatcggcctggacaaccaaaacattctcctcctttccataattcagatacggtgtcagatcataacggaacgaaacatatccgttgggacgaaaacctagcaaatgtccgttcagccagactctactgttccggtaaacgccgtcgaaatcaatatagatcacttttcccttgtcgctttcaggcagtttgaagtgtttccggtaccaccccattccaccgggcagcgcaccgcctccgggagttgccgggttatcgagagaaaaatccgcctcgatgctccagtcgtgaggcaagttcaggactcgccaattgctgtcatccgtatcgggagcggacgcattggcttgtttttcagtcagggcaaagcgccattctttgttgaaggatattctttcacgccctttttcccgtgtggcacatgcagtaaggaacagacagaccaaggcaaatacggatagtctcatacgtgtacagttaactcgtttatattatacaaaggtaatacaaaagagactaaaaaatgagggatgaacacacaaaataaagaggtatatcgttataatatcatacatttgtagggatgaacccggtttgttcatcttcaaaaaagaaagataaaactatggcagcaaagaaagatagagtgctttgggcagacgatgagatagatttgttaaagccccacatccttttcctgcaggacaagggatatgaagtgattccggtaatcagcgggcaggacgccatcgaatgctgtaaggaagaatcgttcgacattatttttctggacgagaatatgccggggcttaccggattggaaacattggcgcagatcaaggcgatcaatcccgatgtccctgtcgtcatggtgaccaagagcgaggaagagagcatcatgaaccaggctatcggtaacaagatcgccgattacctgatcaaaccggtcaatccgaaccaattgctcttgtctatcaagaagaatgtccacaagaacgtaatcatatccgaaacaacgactgtcggctatcagcaggagttcgggcgtatcggcatgcagatcaacgactcactgacaaccgatgactggatggaggtatacaagaagctcgtctattgggaaatcgaattggaaaacagccaagttccgatgaccgacatgctgcgcatgcagaaacaggaagcaaacaacgcattcggtaaatttgtcaaaaagaattacgtggactggattcagcatcctgaaatccgtccgctgatgagcccggatttgtttaaaaagaaagtattcccgatgctcgacaacggggataaggtattcttcatcctgatcgataatttccgtctcgaccagtggcgcgaagtaaaagatctgcttgccgaatactatacgttcgacgaaagcctgtactacagcatccttccgaccgccacacagtatgcccgcaactcgatcttctccgggctgatgcccttgcagatcgaaaagatgtttccggaactttgggtggacgaggacagcgaggaagggaaaaacctgaatgaagcaccgcttatccaaacgcagatcgagcggttccgtaagaaatatacgttctcctaccataaggtacatgattcgcagtataacgacaaattgctgaatatcgtcccttccctccttcataaccaactgaatgtggtggtactgaactttgtcgatatgctgtcccacgcccgtaccgaaaacaagatgatccgcgaactggcccagagcgaagcggcctatcgcagcctgacacgctcctggttccagcattcgggcacgctggaacttttcaagcgtatcgccggaaaagggtataaagtgatcgttacgaccgaccacggtactatccgcgtcgataatccggagaaagtgataggtgataagaatacaaataccaacctgcgctataaggtgggcaagaacttgaattataatccgaaggacgtgtttgacattcgctttcccgacaaagcggggttaccttccccaaacctgagcagcaaatatatctttgtgatgaacaacgattttttcgcttatccgaacaactataactattacgtttcttattataagaatacattccagcacggtggtatttcaatggaggaaatgctgattcctttcatcacgatgacggtaaaatgattgacaactgcaaaataattggcaattggcaattgttaattgccaattgttttaactttgcaaccataaacaccaattgccggttgccaattctctttctctctgaattggcaattgtcaattgccaattatcaaagctatgcgtacaattaaaatcgaaagtttagatacgatccgccaagcagccaaagagtttattgccgggatggatgaccgtaccgtattcgcattccgagggaatatgggagcagggaaaacgactttcatcaaggctatctgtgaagagttaggcgtggaggatgtcatcaacagcccgacgttcgccattatcaacgaatatcgcagtagcgaaaccggtgagctgatctatcattttgacttctaccgcatcaacaaacctagtgaagcggaagatataggcacggaagattatttctatagcggtgccctctgctttatcgaatggccggaaaagatcgaagatttattgccgggtgacgttgtggaagttgccatcacagagaaccctgacggttcccgcaccgtagaagtgaaataagatggaacctaccgaatattttattctgatactctttatcgcattagggatattctcggttatcgctgcgatcctgaatctcgactggtatttccagaccagcggagctatgacattcgtcaggtggctaggacgcaaaggcgcccgtattttctatgctcttttgggattaggattgattgcttgtggagtggcaggacttatcttctggaattgataacgggcaattgaccagtgacaattcgaaatgtaacgaaccggccaaaggtcgaacaaaattgtcaatggtcaattgttcagaccaatgcaaagtccagctgtttcctttccaggttagcttgtgctacttttacagtgatggcatctcctaaccggtaaatgcgctttgttctacgaccgagcaggcaatagttcttgtcgtcaaactcgtaatagtcgtcatcgaggtcacggatcgggacaagcccttcacatttgttatcattcagctccacgtacaatccccattcggtgacaccggatacgacaccatcgaacacctgtcccaatttatctttcataaactcgacctgcttgtacttgatggacgaacgttcggcatttgaagccaccatttccatctcggagcaatgtttacaatactcttcatatttgttctttatcacactacggccacctgccagatagcgttccagcaaacggtgcaccatcatatccggataacggcggataggagaagtgaagtgtgtataatagtccattgccaacccgtagtgaccgatattatctgtcgtatagtgggctttctgcatggaacggatagccaaagtctccaccagattttcttccggtttaccctgtacactatccaacaatttattgatccctttggatatatccgttttcgtcccttccgtacgcattttgtaaccgaaacggctaatgaatgcggaaaaatctcttagtttctcagggtccggctgttcatggatacgatagacaaacgttttctttgtcttattcttactctttccaataaactcggctaccgtacggtttgccaataacatgaattcttcgatcagtttattggcttccttcgattctttaatgtaagttcccaacggcttaccgttctcatctatatcgaatttgacttcgtaacggtcgaaagcaattgctccgtccttgaagcggcggtcgcgcaatttttgtgccaggccgttaagtgccaggatttcttctttatattcaccctccccggtttcgatgacagcctgagcctcttcataagtgaagcggcggtcgctcttgataatggtacgggtgatatgagactgttggatttcggcattcttattcagctcgaaaatcacggaaaaacaaagtttctcttcattcgggcggagcgaacagatctggttgcacaagcgttccggcaacatcgggatggtacggtccacgagataaacagatgtcgcacggctgaaagcttcccggtctatcaggctttccggtttaacgtagtaggtcacgtcggcgatatgaacgccaacttcccaattgccattatccagcttacgggcggaaagggcatcatcgaaatccttagcgtctttcgggtcgatcgtgaaagtcgtgacgccacggaaatcctcacgcttggcaatttcctcttccgggattgcatccgatatcttttctgccgccttttcaacgtttgccggatatttatatggcaggtcgaactcagccaagatagcattcatctccgcattgttgtcaccggccgtccccaggatatcgaccacctcacccaacgggttcttagcctcttccggccattcggtgatacggacgatcgctttgtcgccggtcttgccgcctttcagtttgtctttcggaataaagatgtcgtttgcaagcgtcttgtcttccgtaataaggaaagcaaaacctttggtcacctgtagtttaccagtgatcgagcgtcgctggctttccagtatctcgataacctcgccttccgggtcagcccctttcctcttggcatgaagttgtattttcaccttatcaccgttaagcgcatgtgcggaatttcgctctgccacaaaaatcggtgtcccgccatcttcggggataaaagagttcttaccattctgacgacgcataaaggttccgacagcagtcgttccccaatcattgtaacggtagcgtcccctgtctatttcagaaatgaagttgtcggaagaaagatcatacaggatatccactacctgcaacttctgcacttgattggtaactcctatcatactgctgatttgccgatagttaaaaggttctttgggagaagacttgaaaacgttgatgatggcattgatcatagcctctttcttcatccgtttgttttcgcctttggagctgcttttcttcttccccggtttattacttttcttttcagatttattcttagtcatattttcttttcctatgttttacaaagtaaacaataaattttaagaagctgtttacatttgtgataaataatattcgggagatttattctccgaaacagttggcccttattcctttaacccccggtttacagcaaaacacactgccgcttaacgggtattcccggagctgctcttcggacaagctagcacgggctgtcgtgatgtaaagcgtatccattttcttaccaccgaaagcgcaggaagcgacattcggcgccgggacctctacttttgccagcaattctcccgtgtagggattgtagcaataaacgccataaccaccccattgggctacccaaagatggtcgtcgctatcgatcgccataccatcgggcactcccgttccaccaggcaaggtaacggctataccgtcgaacaggatatccccgttgtcggcatcgtagcgataacgggctattttgccggtaggtgtatcgttgtaatacatgaatttcttgttggacgaccagacgatcccgtttgagatcgtgacctttttcaatttcgtagtgacggttccggcaggcgaaacagtgtacaaagttccggcacctttaggcgcaccgaaccccatcgttccgacccataaatgtccggccggatcgcatttaccgtcattgcagcgcactttaccgttttcgtcaggtatcggagcaacggaagtggtatgtccgtcatgcaggtttacccgtacaatttcgttttgcaaggcaatgatgaccgtgctgtctgtttcgggaaccaccgtcgataccatacggtcgaatttccaggaactgcattcttttgtatcgggatgatattcgtataatgtttgcccttcaatatccacccagaataaggtgtgacgttcggggtgccagatagaaccttctccggtagtcgcttcagcctgataagctaactctgctggaatcatttcgacctttggtgaacaggatgtcgtcataattgaaattgataataaaataaatgcattaataagaaaatgtttcatggtataaaaagactgttcttgccagttatggataagttttatgcaaacatactaaataaatccgatatttcttttaaattaggccccgaatttatataatcggctctgattgccattaatgaacagattttaaataaatagtaaaatgaaagagttgaatgaaaaaactgccggtaaaatgctgcatccggaacgggtcatccagttcggagaaggcaatttcctccgggcattcgtggattggattatccagaaaatgaacgagaatgtaaattttaacagcagtgtcgtggtggtccagcccatcgaccggggaatggtcgacatgttgaacgcacaggattgcttgtatcatgtcaatcttcaagggttggacaaaggtgaaaaagtcaacagccttacccggatcgatgtgataagccgcgcattgaatccttatgcggacttttccgcttttatgaaactggcagaacagccggagatacgtttcgtcatttcaaatacgacggaagcaggaataacattcgatccggcttgcaagttggaggacgcgcctgcctcttcctatccgggcaagctgacgcaattgctttatcaccgctacaagacatttaacggagaaaaagacaaaggtttgattatctatccgtgcgagttgatcttcctgaacgggcataaactgaaagaaaccatttaccagtacatcgatttatggcaattaggagaagatttcaaaacctggtttacggaatgctgcggtgtatatgcgacactggtcgaccgtattgtcccaggatttccacgtaaagagatcgattcaattaaagaggaactgcactataacgacaatctagtcgtacaggcggaaatattccatttatgggtaatcgaagcacccgaatcggtcgccaaagagttcccggcagacaaagcaggcttgaatgtgctgtttgttccgaacgaggaaccttaccaccagcggaaggtaacccttttgaacggccctcatacagttttagcacctgtctcttggctttccggggtgaatatcgtgcgggatgcctgccagcacgaggtgctggagaaatatatccacaaggtaatgttcgaggaattgttggaaacgctgaatctgccgaaagaagaactggtgaagttcggcaatgacgtcatggaacgttttaacaacccgttcgtcgaccattcggtcgtatccatcatgttgaactcatttcctaaatatgaaacacgcgacctgccaggcttgaaagtctatctggaacggaaaggcgagttacccaaaggactggtgttaggtctggctgccattattacctattataagggatacgtccgtgccgatggaacaaaatccgaaccgaatgattccgccgaaattcttcaactgttgcagaatctttgggctaccggctcgaccaggcaggtcgccgaaggcgtattagcggcaacttccatttggggagaagacctgaaccgcattccgggattgaccaatatggtaaaaggtttcctggatgccattgaagaaaaaggaatgcttaatgtcgttaaagaaatttgctgatgcggacttatatacaaataaatccggcagacaacgtcgtggtcgccgtaaaggatttacagaccggcgtatctttggatatcaacggcagaacaatcgttgtcctgcaggatatccctgcagggcacaaagtagccttacaggattttaaagaaggagaccatgtcatcaaatatggtgctcccatcggacatgcacgtgaagtgataactaccggaagctgggtgaatgaaaaaaatatcaagaccaacctggaagggttacgggaatatgaattcaatccgcaacctattccggaacagccatccggaaagtcactttcttttaaaggatatcgccgcaaaaatggagaagtgggaatccggaacgagatatgggtgattccgactgtcggttgcgtcaacggcatcacgcaccggttggcagatcggttacgacaggagacacaaggcaccggagtcgatgcgatcgtcgcattccctcataattacggctgttcccaactgggagacgaccatgagaatacccggaagattttacgggacatggttctgcatccgaatgccggtgcagttctcgtcgtcgggttaggctgcgaaaacaaccaagtcggtgctttccgggaaatgcttggcaattacgataccgaacgcatccgctttatggaaacgcaaaaagtggatgatgaactggaaacgggaatggaactgttgcgtaaactctatgcgatcgcttcacaggataaacggacggatattcctttaagtgagttgcgcgtaggattgaaatgcggaggatcggatggattctccggtattacggccaatccgctgttgggtgtcttttccgactttctggtagcacagggaggaacaactgtcctgacggaagtcccggagatgttcggcgccgagacgatcctgatgaaccggagcgaatcgaaggctgtctttgaaaagactgttcatctgataaatgactttaaatcctatttcatagagaacaaacagccgatttacgaaaacccttctcccggcaataaggcgggaggtatttccaccctggaagaaaaatcgctgggctgtacgcaaaaagccggaacttcagccgtccgggatgttatgctttatggtgaacggctaaagacaaagggactgaatttattgagtgcccccggaaacgatctcgtggccagtacggctcttgcttcctccggctgtcatctggttttgtttacaaccggaagagggactccgttcggaacgtttgttccaacagtcaaagtttcgaccaacagtaatctaaatgcccgcaagccaaactggattgacttcaatgccggttctcttttagagggcgaaagcatggaggaacttcgtgaacgctttatccggttcatcattggtatcgcaagtggtaacccgacaaacaatgaaaagaatgattacagagagattgcaatcttcaaatccggagtaacactttgattcatggagatatcaaaattcctttatcatgatcttttaggcacggatctcacggatttacacggataaatttattttctttccgcgtaatccgtgcctaaattatatctcttgcaagcaggattttgtttcgacactccttactattaaatcttcttctcaataaccgcctgtactacattcagtacataatcgcctaacttttcggcctcaccgatgatgtccatgtagtagacaccgtcctggtactggtatttcttgttgttgatgtcttccacattatggatcttcaactgattgcgataattgtttatttcattttcgatattgtaagatgggttgacatcgtcgcgtacaagttccgatttcttcagtatctcgatcatgcgatgcaaagccttctccgtaagtgccaacatctggtccacattatggttctgctcgtctgtgaatatcgatttaaactcgttgcggcgtttgatgcttcgcgccatattattgcaggaatctgctatactttcgatctccgatacggcacgcagcatgatacggatttcttccttcccttccgaactcaagcggccttcagccacgcaagtcaaataattggcaatctcgatctccatccggtcgctgatactttcgtatttctctacacggctatatgttttcaggaaagcatcctcgttcttctcatagaacagagctttcaccatatccagcatacggcccgtacgctcggcaaacagcgtgatctccttacgtgcttgcaagatcgaaagttcggcagtcgacagcatcccccccgtaatataacgtaaacgatattcctcatcctcatctttctttcctttgataaggaagcaaaccgtcttctctatcaatccgacaaaccagatcataacaaatgtattactgatattgaaagccgtatggaaagcggccagtttgaaggatactgctaccgagggatcggaaatgcgcattacattcgtgacgaaccaagaaacggcattggtgaacggatagaacaaaatcaacacccagatcacaccgaatatattaaaggcaagatgtgccaaagccgcccgtctggcttgcgtattaccggtcaaagccgccaggttggccgtaatcgttgttcctatattttcacccaatacgagtgccacacccaattggtagtcgatccagccgttggcacacataatcaacgtaatggccatcgttgcagctgaagcctgcacgatcatggtcaggatagccccgataaacaagaacaggatgatagagaaaaatcccatatcggcataattctgcacgaaggcaagcatctccggattggctccgagatccggagcattggctttcagggcctgaagccccataaagaggaaagagaaaccgaaaatgaactccccgaccgacttacgtgagcttttgccggaaaagaggagtggaatgccgaatgcgagtagaggaagggagaaagccgcgatgtcgactttgaatccgagagccgagatcaaccacgcggtaacggtcgtaccgatattggctcccattatgacaccgatggattgggtaagagtgagcagaccagcgtttacgaaactgaccaccatgactgtagtggcggatgatgattggatcagggcggtaattaaaactccggtaagaactccggtaaccctgttggtcgtcatggccgtcagaatcctgcgcaaactgtcccccgcaaatttctgcagaccttcgctcatgatcttcataccgtataggaacaaccccaaggaacctataaggcgtagaaaatcaaaaaatgaatagtccatttaaaatacgtttaagtggatgtatatccgattaatattcctaactttaggggacaaaagtataaataataactgagataccatgtctgaaactattacaatttattgcaaaaataacaatacttacaaagaagttcccattggttcttcgctgttggacatctattcactggttggtgctcccctccggttacgaccgatgaatgcacaggtaaataataaaacagaggggcttaccttccgttgttggcatccgaaagatgttgaatatgtcgactatacgcaactttcgggaatgcggacatatgtccgttccctctgtcatattttctcgaaagcagtgaacgacgtgctcccttcagcgactctgaacctggagcatcccatctcgaaaggctattattgcgttattcacaacggtaaagacatagacgaggagacgatcggcaagatcaagaaacggatgcgtgaaatcatcgacgcagaccttcctttccatttgaaaacgattcgcacgatcgatgccgcagtcttgttccgtgaaaggggcatgaacgacaaagcccgtctgatcgaaagcgccggtatgccttatacgtcttattacgaattggatggctacatcaattatttctatggctgcctgactccttccaccggctacatccaggattttgacctggttccctatttcgacggcgtgttgttgcgtgtgcctcaaaggacgaatccgacggaattggaaccggtcatccgccaagataaaatgtttcaggtttataaggagcatctgaccctgcaacgcacggtcggattggacaacgtcggcgacctgaaccgggcgatagagaaaggcatgacatccgaggtcgtcatggtctccgaagccatgcaggaaaagcaggtagccaagatcgcagaggagattgccgcccgctacgataacggcgtccgcatcgtgttgatttccggaccgtcttcttcggggaaaacgactttctgcaaacggttgcaggttcagttgattacaaacctgatccatccggtcggactttcattggacgattatttcctgaaccgtgaagatacgccgaaggacgaatccggcgaatatgacttcgaatcgttgtatgcgctcgacctgccttatttcaacagcgaattgcagaaactcctttcaggtgaagagatcgaagtgccgagctttaatttcgagacaggtcgccgcgttttcaaaggaaagaaactgaagatgcagaaaaactccgtcctggtgatagaaggcattcacgccctgaaccccgaactgacttccatgatcgaagactgctataaataccggatctatgtatccgtgctgacttccatctcgttggacaaccataactggattccgacaacggacaaccgtctcttacgccgcatcatccgcgattaccggttccgcggatattccgcccgtgacacgatcgcacgctggcccagcgtacgccgaggtgaggacaaatggatattcccgtatcaggagaatgcggatgcgatgttcaacagcgccatgttgtatgaactggctgccctgcgcaaggaagccgaaccgatcttgggcgaagtgcgcgaatgcgatccggagaatgccgaggcgtaccgtttgctccgtttcctccgttactttaattacatccccgatgtcgggcttccgggcacttcccttttgcgtgagttcctcggaggcggcagtttccgatattgatctgcaacaacggaatgctttcgttgggaggaataaaagttacatacctatgaaaatactgtttcccacctatgaaaatatatttccccgcaagagaaaataaattttcataggtggaaaacaggtgtccgcattcatagttacaacctggaaccggtttgcaatattaccctggccatgctctttttcggcgaagcgaaagggttgaaccctgctttccatgccggattagggttgcacctcctttccgtcctacgagaaacgcaggaagctatccgttgtaagggagcgtaaaccagaaccgcgcaccttctcccggcctcgaatcgacaccgattgtcccattgagagcttcgatgatggttttgcagattgtcaagcccaaaccggttccttgcttaaacgagttgactttcacgaaacggtcgaagattgcctgttggtgctggggtgatattccgatacccgtatcaattacttcaatcaatacatagccttctacgatacggtaaaaaagccttatgcttccctcctccgtaaatttggtggcattagagatcagattcgatattacttgtgtaacccgcttcggatcagtatggacgagaatgtcaggcaaggcatcaaagtcacagatcaaagagactttttcaggcattttcaacgcgtgtaccagatattgctcatgaaagatatctttcaagctggtgtcggtaaacgaataatccagaatgcccgattctattttggaaaaatcaagtatatcggtaatcagacgaaggagcaaatcactgttcttactgattattttgacaaactcttccttttcttctttatcgtcagtctcggcaaggatattggaaaatccgattatggcgttgagcggcgtccgaatctcatggctcatattggcaaggaaggctgatttcagtttgtccgcctcacgcaccttctgtatctccagttccgactgccgggtttcatattccgcatggtgcagtttctcttccaacagtttttcttccgtgatgttagtaatatggcagatcattttgttctgccgcttgcttcctttcgtcttataagcctgcgcattgatgcggatccagatcgtttcgttttcaatagcggtacgacattcgaagctgcaatgatcctgcttcccttctatcacctggaaaagcaggttgacattatcggccgaacgaacaatctgctgtacacctccaatcgtcatgtacttattacttctcaagtagttgaagagcttgttatcttccggtgtttcgttcaggagtggattgacaaacaattctttctttccgatatcatattcgacaataagggaatgaccggacaagagaactgcttttaggatcgccaaattgttttgcgtctgctcctctttgacccgtttttctgtctcgtcggagataatcagcaaatagccgatatgaccgaactcccggtcgttcaacccaattcctttcaccatcagatatttggtttcatcagaaatgctggaattatagtaacgggcatcccggatacaattgaaatcgtatgcaagtggaaaactgaatgccttcttcttcttgatctgattaaggattctctctgggacagccggattcttgaacaggttgactcccaataagtattcccgggaactgccaaagattctagtgtcggcatcgtttatatcgatcagataaccttctgcatcatataattccaccccgatcggcagattattgaaaaactgctgaaactttgtactcagcttggagatacgttttctcgattcctccaggttgtaattggtttgccagcgttcgattattatggaaaaaataccagcaatgatatgcatgtcttccacttccgaagcagtccaaaaacggctcgtccggatcgaatcgaaaccgatgaaaccctgtactttattatggaaggtaagcgggacgatcagcatggacttcagatgttgttcagtcaacaggattttatcgatatccgcttcggcaggtaggccggcaatatctcccagcacgatatcgtgtccggctttaacagtgtcaataatccacgggattgtgtcgcatgtcaacttattccgatcatccttagggatctttacccacgaactcattacttcacatgtgaaattggccgcaaacccgtcttcttcaaagatggcaacataaccccaatcagcattgaaatagcccagtaacaaattcattgctttttcgataggcttgttttcttcgttgaaaaggatcgccaagacttcagaaataatacgtttgattgtcggcgtttccgaggatatataaatctcggcattgtcaggttcattatctctggcttccagtaatcgtattaattcttcccgggtcaactgatcgtatagtgatgctttaagagtcatataagattctttatctgatcgcaaaagtagaaaatagttttgatttttaatacttttcggcaataataataatttaatctatcctcctttagaactattatattttgaatgtcgagatcattccgtgtaaaaagttatatttgcatgttctaacattggacggtctggtgattgtcctttcattattgaatttgattatgttgaagcaacagttacaacaaaagttacagcaaaaactctctccgcagcagattcagttgatccggcttctggaactccccgccatagagctggaagaacgcataaagcatgaactggaagacaatcccgctttggaagaaggaaaggaaattgcggatgactttgaccgtactgacgaaggtggtgaggagttggcagctaacgagatggaaggagaaagcgagacagataccgacctttcactcggtgactacatgagtgaggacgacatacccgattacaaacttcgtgaactgaacgagcgggcggaaaagaaagaggacgttcctttctcggtcagcgaatccttgaacgaatatctgctccaacaactcggactgcgggatctgccggagaagcaggtgaagatcgctgaatatatcatcggaaatatagatgatgacggttatctacgccgtgacctgtccgccatagccgatgacttggtgttccaggcaggacaggatgtgacggaaaaagaaatagagacagttcttgcaatcatacaggactttgatccggcaggagtcggtgcccgtaatcttcaggaatgccttctgctccagttggcccgccgggaaaaaacatctgagacgaggttggccaccttgatgttaaccgatttttttgaagagttcacccgcaagcattacgacaagatcataaaaggactggatatcgacgaaaccgccctaaaaagggccatccgtgaaatcacaaccctcgaccctaaaccctgcgccagttggggaggttctatggaaacagctttgagccagatcattcccgattttgtggtggaagcagtcaacggcgaactgatcctaagcatgaacaaccggggaattcccgacatgcgcatcaaccgtgaatatgcggaaatgtttcaggattatgccggcaacaaagcgaaccagacgacccagatgaaggaggccgttcagtttgtgaagcagaaactcgattccgcccaatggttcatcgatgccatcaagcagcgtcaagagactttgcagcgtacgatggaaacaatcatccttttgcagcgcgacttcttcctcaccggtgatgaagcgactttacggcctatgatccttaaagatgtagcggaacgggtcggatatgacatatcgacgatctcacgtgtgagcaacagcaagtacgtacagacaaatttcggtatttatccgctcaaatacttcttctccgaatcgatgcaaaccgacagcggtgaagaaatttccacccgagaggtgaaaaagatcatgaaagaacatatcgacggcgaagacaagcgcaaaccgcttaccgatgaagaactggcctccatcctaaaagagaaaggatatatcatcgcacgccgtacggtagccaaataccgcgaacaattgggtattccggttgcacgtctcagaaaagaaatataaatttgaagcgctatgaggttattttcaaatatcatatccggcatgttccatccgttgctgatggtgacgtatggagttgtgctggctctcaccttcacatatctggcaatttatccgccagcaatgaaactgttgctcgcaggcggagcgttcctgtctacggcggttatccccggagcatttatctttatgatggtaaaaaacggggcggcggtcgatatggagctatcggacagacatgaacgcgtggttccgtatctgatctttatcacatcaatcatggtctgcgctttctatatgtataaaatgatgctgccgttctggttcatctccctgttattgggcgcctgcgtggcgttaatcatggcactactcatcaattttttctggaagatcagtgcccatgcgatcgggacaggtggattgctaggtggtattatgggagtagcccggatccatttgataaacccttactgggcctttatcatcgtaatcctaatagcaggattggtcggtacttcgcgtatctttctgaaaagacatactcctatgcaggtatatgccgggttttgtctcggatttatatgtacctttgtagcctcattcttgagttatatctatttattcatctaataaaaacactaaaattatgaatttccctgcagatttaaagtacacaaaggatcacgaatggatccgtgtagatggcgatgtcgcttacgttggtattacagattatgctcagggcgaactgggtgaaatcgttttcgttgacatcacgacagaaggcgaagttgttgccaaagaagaagtttttggtacaattgaagcagtaaagaccgtttcagacctattcatgccggtaagtggtgaagtgatcgaagcgaatgccgagttggatgacaaacctgaactggtgaatgaagatgtatatggcaacggatggttaatcaagatatctgtttcagatccctctgaactggatgaactgatgtctgccgccgaatacgaacaaatgattgcgaaatgacacctgtagtcagtattatcatgggcagtacttcggatctgcccgtaatggaaaaagcggccaaactgcttgacgaaatggagattccattcgaaatgcatgccctgtctgcccatcgtacaccagccgaagtggaagcattcgccaaaggagccaaagggcgcggtatcaaagtgattattgcggctgccggcatggctgcccatctctgtggagtgatcgcttcaatgacaacagtccctgtgattggagtgcctatcaattcaacgctcgacggtatggatgccttgctagccatcgtacagatgcctccgggaatcccggttgccaccgtcggtatcaacggtgctttgaatgccggtatactggcagtccaaatgctcgccgtcggagacgaacaactccaggataagcttgccgcttataaggaagaccttaaaaagaaaatcgtaaaagcgaatgaagaactggctaaggtttctttcaaatataaaatgaattagttgaaaggtgagagttgaaagtcaacaaaaatgcaaagtattcgataccgcttgcctcccttgttgactctcacctttcaactctcacctttcaactttcacctttcaactaaaaaagatggaagatttttttaactatcgtcgtcgcaaatcgtctattgtcaacataggaaatactccgttagggggcgataatccgattcgcatccagtcgatggcaaacgtctccacaatggatactgatgcggccgtctgccaggcgatccgaatgatcgaagccggtgcagaatatgtacgtttcaccgcccaaggagaacgtgaagcccgtaatttaggtgtaatccgtaaacaacttagcgaagccggatatacgactccgttagtcgccgacatccattttaacccacgcgcggccgatgctgctgccgaagaggtggaaaaagtacgtatcaaccccggaaattatgtggacaaggtaaagacgttcgatctgcaggaatacaccgacgaggaatatgccgcagaattacagaagatacgcgaccgcttcataccattccttaacatctgcaaagcacacggaaccgccattcgtattggcgtaaaccacggttcgctgtccgaccgaattatgagccggtacggcgacactccagaaggcatggttgcctcatgcatggaattcctgcgtatttgccgggatgagaattttcccgacgtcgtaatctccattaaagcctcgaacacggttgtaatggtgaaaaccgtccgcctattagtccgaacaatggaagccgaagatatgtactacccgttgcatctcggtgtgacggaagctggcgatggcgaagatggacgcatcaaaagcgctgtcggaatcggggccctattgtccgatggcatcggcgacacgatccgcgtctctttgagcgaagatccggaggctgaaatccctgttgcccgtaagctggttgactacatactcgaacgcgaaggacatgaacctgtagaggcctcacctgcccccggttatgatccggttacagccgatcgtcgtcacagccgggtgacggaaagaatcgggggaaatttcccgccggttgtcatttctgaccgtagcaacggtgattttgagtttgatcatgcgtcacagccggactatatatacataggcaaggaagatccggagaacctgccggacaactttcgtcttttggtagacgcccacttctggaaagaacgtccgaacgcctatcctttttttatcgcatcggaaatagacgagttaaaagactattctgttcccttgaaatttatccgccttacctaccgagatctgaccgaccgcgtgatcgaagtgctgaagcaggataagtccgtaattgtcatcctgagcacacatcaccggaacggtatcgctgccgaacgtgccgccatgcatcacttgctggcagccggttgtgatgtgccgatcatcctgcatcgcgactatagagagacagatattgaagcgttgcaactgaaagcggccgtcgacttcggaactttgctgttagatggcttcggcgacgggatcatgctgcacaacgaagggtacgaaacgatggtaacggacagttgtatgttcggcatcctgcaagcaacccgtacccgcattagcaagacggaatatatctcctgcccaagttgcggacgtaccttatacgacttgcaaacaacaatcgcccgtatcaagaaagccacttctcatctgaaaggcttgaaaataggtatcatggggtgtatcgtgaacggtcccggcgaaatggcagatgctgattatggctatgtcggcgccggaaagaaccggatcagcctatataaaggtaaagaatgcgtcctgaaaaatatccccgaagaagaagctgtagaacgattagtccagttgataaaggaaagtggagattggacggatcattgagtataattgaaaaggagtgtgtcagatacaaattatattgaaatcaatatgtccgtatcttacacaccccttaatccttttttaatcttgcctatacgtttttattcctcagaccttatatctttctcctcatcaaaccctccgtcgaaccggttatccttgatctcgacattaacaacgcgctggaagaagaaacgatggttgttccaatggaaagccggataatcatgattttgtctaatcacattattgcgaaagactaggccgtccacagattttgcatacaggatcggcatatcaaaggtttcgaactcgttgtcctcaatcacgattccgctgtgaaaatatctcttctgacttttcaaatcaggtatctccggatatatagaaataacggcgttcgtaaattggaactgatttgtcaaagcattgataaacttgttattccggatatgtacgtcatggcaggcacccgtctcgaaccacccgttgcagtcgccgcacagtaggattgccgtaccggatgtgtgatcaaaaacgttcttctcgaccacagtcttcttcggagtactgaacagggaaccacgggcacggttattacggatcacattatcggcaaaataaacctccggcgtccattccagattctcgataccgtaagtaccaacctcactaatggcgggatcgacaggtttctcaaacgtaatgcggaactgttttgcaccatggccgtcaggcttgtcggctgcttcaatcgcagccaccttgttctgttcacctaaaacctccatcgttttggactcgatgaactggacgacatcgcccggacgcccccattcgaaaccgtaggactgcccgtgcatatattcgccgaccaacgtcttgttgtctattcgcttttgcaccttcagataggttccatgcacattgatggcatcatccatcataccttcatacagaccaccgaccgaacggatcaatcccttacagccggagaaatgagtcgcatcggcctgtgtcgtgaaataacgtggatcgtccttgccacgcaggcagaccgagaatttatccaacgtgatattttcactcatctgggccaacagacccattccttcagcataatgaacctgtatattttcgagtgtcgtattcgtatcatgatacataaatacacccggagtcggacgaccgtatccacggaacacaacgaccgttcccggtatcagtttcttgttcttccaaggcgcaagaatcttgcgggaagcaatctctgcgacatgcttgctgcccacactaatatcgctggtggtatagaccagtcgctttgtatctccttcaaaagcgatgccccaggcagggacatgttcccaaccttcccctttagcgacaaagttgctatcgcgtatttcgtactccacccagggagcgacctcataggtgatcaagcctccgaccgtgtcgttctccaacactttcacttggctgatatgtggattcgcaaaatcgatactaaagttcttcaatgtacagttctccgaaccgaccaaagaaaccggaagcatccgcccatggaaaaccagttcggaaccttgtccgtcaaatatcacattcttcatattttcaaaagccagtcccaccagtttcggattatcctggtcatggttggaaatgaagtattcacgtttggaagcaccttcgggatagaaatcataacgtcccttcggcaacagtatccggaccgtatcggagttcacttccgccgcaatctcttgaagagctttcgcaatcaacggagaagcattttccccggtatccggtttcagaccatatccggacaggtcatacgcgccgcctttacatgccgtaaacaaagcgataaataaaagtgtcaaaacagaatttagtttcatggcttacatctttcgttgattatattttcaattatttagggacaaacttactcaaaattatccgattttattgtaagtttgcccctcttaaatataaatagatatggaacatccaataagcatttataacacactcacaagaaaaaaggaacagttcatcccgctgcacgaaccgcatgtgggtatgtacgtttgcggtcctacggtttacggtgacgcccacctgggccacgcacggccggctatcactttcgacctgctgttccgttatctgactcatataggatacaaagtacgctatgtacgcaacataacagatgtcggccacctggaacatgatgctgacgatggtgaagacaagattgccaagaaggcccgtctcgaacaactcgagccgatggaagtggtgcagtattacctgaaccgttaccatcacgctatggaagcgctcaacgttctaccgcccagcatcgaaccgcatgcgtccggccatatcatcgagcagatcgaactggtaaagaaaatactggataacggatatgcttacgaaagcgaaggttccgtttacttcgacgtggagaaatacaacaaggatcataattacggtgttctttccggacgcaacatcgacgatatgctgaatactacccgcgcactggacggacaggatgaaaaacgtaatccgatcgacttcgctctctggaaatgcgcgcaaccggaacatatcatgcgctggccttctccgtggagcgacggtttccccggatggcactgcgaatgtacggctatgggtaaaaagtatctgggcgaacatttcgatatccacggtggcggcatggatctgatcttcccacatcacgaatgcgagattgcacaggctgttgcttcacagggagaagatatggttcactactggatgcacaacaatatgattaccattaacgggcagaagatgggcaagtcattgggcaacttcatcacgctggaggaattttttactggtgacaacaaggtgctgagccaggcatattcgcctatgaccatccgcttcttcatcctccaggctcactaccgcagcacggtagacttcagcaacgaagccctgcaagctgctgaaaaggggttggaacgtctgatggacgcttataatcatttgatgaagctgaaagcctccgacgtttctactgtagatgtgaaggatttgcgccgcaaatgctacgatgcgatgaacgacgacctgaactcgccgattgtaatcgcccatctgtttgacgcagcccgcgcgatcaactccgtaaaggatggcaaggctacgatctcggccgaagacctgaaagagctacaggatgtattccataccttcgttttcgatattctcggaataaaagatgaagcagcttcgggcggaagcaacaacaacgaggcattcggcaaagcaatggatttgctgctgaccatccgccaacaggcaaaagccaataaagactgggctacatcggacaagatccgaaacgaactgacagccatcggcttcgatatcaaagatacgaaagacggagccgaatggaagttaagcaagtaagacgagcgttcgatatttgacagaaaggaagcataaatgatgatttactgcttcactcattcttatcattggcacattattttttataatcatgacaataaacgaatttcttcaaggcgacaagttcgccttattggctggtgtcgaacttttggaaacgggcaacggttatgccaaagcccgtatggaaataaagccggaacacctcaacggcggtggtgtatgccaaggcggtgctatcttcactttagctgatctggcttttgcagcagcaacaaacagtcatgcacgcctgacactttctattacatccagcattaacttcttcaaagccgaaagcaaagggttcctttatgccgaagctcgtgaagcattcagccacaagcggctcgccaactgtgaagtgcggatcaccaatgaaaccggcgacctgatcgccaccttcaacggaacaggctacagaaaagatacggaactgccgtttgccccaatagaatgatttatctaaacctatcgaacaaccgctgcagattttgtccacggccccaaagtaaagctactttgatgcaattgtccttgatataataataaattaaatgtacgctatcgccgtcagatgagcaaatagcgtacatttgtattttattcgtaacgcaaagaccgggccggtttgctaaagatggttttggcggtttgccaaccgatggtcagcaaggagatcacacacaataaaacgaccggaacgaggaagaaccacgctttccagtccgtgcggaacgaataatgattcagccaatcccccatgatccggcccgaaagcggaagggcgatgacaacagcaatagcaatcaacaggaagaactctcgccccaattcaaagaaaagctgcctccgggaagctcccagaaccttccggattcccatctcccggatacgagtcgaacaagaaaacataaccagaacagccaatcccatacaagagataaagatcgccaatatcgcaaaaagcgccacaatcaacccgaacacttcatcctgtcggtattgctggtcaaaaaactggtcgagaaagaaataatcatagctggaatccgggaaataacgttcccacactccttcgacctgtttcacgagatcacgcgggttaccgttctccataacgacagagatataacgttgtttcatccaactcaatttctcatgcagggcaaacaagatcggcgtaaaatctttgttaagcgattgttgatgataatccttcacgaccccgataatctgcatcggctgatcgacggtttcgacagacaagcgttgccccaaagcggcatcggacgattcgaatcccaacgtacggacagccgattcgttcaggacgatcttataaacatctcccccgtaatcttcggaaaaaccacggccggaaacgaacttcagatcataagcttccagaaaaaactcatcgcagttcaacatctccaacaggcgcgtctgcttcgtcacatcactttcgcggacgatggacaggaagtcggttacctccgttccgggaactgcaccagaaaccgtcaccgccctgacggagggcaataacgccacctctttcttaaatgcctccaacttcatagccagttcctcgcattgcgccgggaacttaagaaccagcgtctggtccacccgtacccccaaagaagcattccgcatatattgaagttgcgcgtacacgatcaacgtcccgcaaagcaacaccagagaagccgtgtattgcaacaccaccaaaaccttgcgggtgaccgtcgccccatgcgtatgggtaaactttcctttcaacatccggatcggcttgatgccggacaaaaccgtcgccgggtaaaagccggacagaaacacaccggcagcaaagatcagcaacagataccaccccagtgaagtcgtaaaccagacggaaaaactcagatcccgtcccgtcaggttattgaaagaaggcatcaacgcctccatcagcccgatagccaggataaaagcaatactgttcgtcaccaacgattcgaaaaggaactgtgaaataacctgcctccggcttgcccccgaagcccgacgtataccgatctctttggctcgttccatcgaacgggctactgtcatattgatataattgatccaagcaatacaaaggatagcaagtgccgtacagatcaacacccagatagaagaacgattccccttcacctccggctcataagctttctgcggattcagatggatatcgcggaggttcgtcaactggatcgcccaagttttattcttcaatgcctcttccgtcttatacttctccgccattactgggaaatcctcttccacctgcgttttcaggttcgccgacttcagcaagacatacgaatagacttcgtggcgataccaatattcatccatccacttcgggagcgtcttgtaggagatcagcagattatagcgaatatgcgtattgatcggcatatcttccattatacccgtcacttcgcaagcttcctctcctatattgcttcggaagatcaggattttcccgatcgggtccgctcccttgaaatatttccgggcaatacgttcggtgataactaccttgttcggtccgtccagacaactttctttatttcccttcaagagtttgaagtcaaagaaatcgaaaaagttagcttccgcatagcctatacctgtctcccgatatagcagttcgttgtatttcacgacctgctccggataatactggcttccgacacgtgtataatcctcgacagcactcatgttttgcttcatagccgtagcatagccggcagacgaactggcccaatcatccgtcagctccccgttctcataaaaccgggcttcaaccctgaagatacgatcctgccggctgtgcatatcgtcgtagctgtattcgaaagccacataggtcaggatcagcaaggctgccgccatgccgatcgccagaccgactatattgacgacactgaaacctttctttttagtaaggctgcgccacgcacagttccaatagtttgttactatcattatgatgaagattttcaaaaatgaatattcaggaaacgacccggccgtccaaaagatggataatccggtgtgcgaagctggcatcccgttccgagtgcgtgaccatgacgatcgtcgtcccctgcccgttcagttctcgaagtaattccatcacctccgccccgtttgtcgaatccaggtttcccgtcggttcgtcggcaaggatcagcggacaatccgtcaccacggcgcgcgctatcgccacacgttgctgttgtccgccggatagctgctgcggaaaatgtccggcacgatgggcgatattcatccggtcgaggacttccatcaccttccgcttgcgttcggacttccggcagccaagataaaccaacggcagttccacgttctcgaagactgtcagctcgtctatcaggttgaaactctggaatacgaaaccgatattccctttacggaaagccgtcaactggctctctcccatcttgtctatctccttgccgttaaagaaatatttgccggaagtcggcgaatcaagcgttcccaagatattcaataaggtcgacttgccacagccagaaggccccataatggccacaaactcaccctgtttgacctcgatgttcacctcgttcaatgctttcgtctgcacctcctcggtggtgaagaccatagacagattctctgttttaatcatattatattcatttaaatcattcgttcctgagaatacgcatcggcttcaaccgaaccacacgccacacctgtctgactaccgtcaagaaagcgacacacatcaacaacacaaatgcgactccgtacacccaccaaggcaacacgatatgaaaagcataactctccagccatccgttcatcaaaaccacagaaacaggaagtcccaatacagtggccagcaccgtaagaagtagcagttcacgtgtcaaaacaacaaaaagacttattttaccggctcccaaaaccttccgtatcccaacctctttcactcgtgccagagtagaaaaaaacgtcacgacccataatcccaagcaggccacaaagactgccaataatgacgcactggcaaaaatccaaccgaaattgcgatccgacttatacaagctatcctgataatcatcgagatagaaataagaaaaaagggcggacggaaaataagtccggtacatttgttccacttcagtcaagcagtcagaattaaccggaccatccatcttgacggatatataaggagtcgcaataaacgggacccgttctttcaggaaaaagaggatcggcttatacggttccgcaagcgactgctgatgataatttttcacaaccccgacaacttcgagtggatcttccagcacttccatctccaactgctttcctaacgcctcttccggagaaggataaccaagcagacgcaccgcctcttcgttcaggacgaccttattccgttcattgccgtatgcttccgagaaaccacgtccacaaagcatttccggcgaataaagcgccagaaaatcataatcgacagcaaacatctgtatcagcttcacttcggatggatcgctgccgtaaggacgattggtaaagtagttcgccacctcaacgcccggcacagcaccggaaatagaaacacggacaacataaggtatctgtcccaaccgtttcttgaaactctccattttgacggacatatcatcggtaaaagccggatatttcaccaccagtacccggttcgaagaagcggaagaagtctcctgctgcatataacgaacctgtccgatcaccaccaacgtaccggaaaccagaacgaaagaagcaagaaactgagccacaatcaacatcttccgcatccggtttcccttacggccatgcagtaattttcctcgcatgatatccgctggacggatgcgtgtcagcaggaatgaaggatacagtccggtaaacaaagttccccctataaaacacgctgccaccatactccagaattccggcaaacggaacgcgccggcagcaaaatccagtcctacccaacggcagacaaaaggcaacagtacctcgacccatccgagagccaagatcaaagccgacaagttcaacaaccctgcttccagcaatccttgcaggatcacctgccggcgggaagccccgaacgccttgcgaataccaaactccctgccacgttccagataacgggcaaccgtcaggttcagcgcgttcacccagccgatcagtaaaagggcgactaccatcaccgaaaggatacgtgcagccatacgactacctttcgcctctttctcataagacttacggggagtcagatgaatatcccgcaaacgaaccagttcgaccctccagtccttatgtttcaatgccgccgtcttatatttttcagagatggaatggaaagccgcttcaatatcgcccggtttctttcccggttcaagccggacatacgtatagacaccgtggatataccaaatatcgcgccttgcctccggaatagtcgaataagacaacaggaagtcataatgcagatgcgaattataaggcatatcggcaatcacgcccgtcacctcgaaatgctgttcggacgaagatgtacggaaagtcagcactttgccgataggatcaccaccggcaaaataacgacgtgcagcactttcggtaatcaccatcgtattcggacggaccaactgtccacccttctcccccttgaggatcgggaaattgaagagatcgaaaaaagccggttcggtataacagtactgttcttcgataaactgccggtcaccgaacgtcacctcttgtccgcgatcttgtgccgtcacacgtacatactgctctatgcccggaatctcgcgatacatggcgggagcatgcccgaaagaagtcgtcgcccaattatccgtcaaggttgccccttcataaagacggctctccacacggtagatgcgatccccgtcgtggaacgaatcgaaactcaattcgaaccgtacatagagcataatcagcagcgccgcgccaacacaaacggaaagaccgaacacattcagggcggaaagagacttccgcgcccgttggcttttgattacttgagaccaatattccatcagcgtaaaattaatcgttcattctcaccaaacaagtcatatccggaaataatcaccttctctcccggttgcaccccttccacaacctcgtaatactgcgggttctgacggccgatacggacagggcggcggcgagctgtctttccttcttcatccaccacatacatgtactcgccgccgcttgcctggtagaagctaccacgtgggacgatcaccgcctgcacgggatcgcccagttgcaggttcaggtggtaggtttgcccggcacggatattctccggccggccggagacaaaatgcaggtcggtgcgaaactgtccttcccgcacttcgggatagactttcgtcacctccatatcgtacttctttccttcacgttcgaagcccgcagggagaccgggcatgacacgttccacatagtgctcgtcgatcttggcttccaccttcagttcgggcgtgatcacctggccgatacgttcgccctgggcgatggactggccgatctgggcctccaggtttcctaactgcccgtcgacgggagccttcactttcaggttttccagtcgcccgcgaaccaaggcaaggctcttcttcatattccggatgttctcgtccaggctctgtagctggctgctgcggaacaggtcgtcctgctcgatccgttcgtccacaacggccaactgtccgagagcagcctcataatcttcctcagcctgcaagtaatcttcgcgggccagcaggttcttcttatacaggcgttcgtattgcctgaaacggcgttccttctgcaccaattccttactcaggccgatacggtcctgtttcagccggagatgttcctgctccatgctgagacgggtgttgcgaagttcgttttcctgataggccaagtcggcttcgctttgcaggatgccgatgttcaggagcgggttactgaggcggaggatcacgtcgcccgcccgcacctgcgtcccttcctcgatcaggcgttcttcgacgcgcccaccctcgatggcgtcaagatagatgatacgatccggcagtacctgcccgataacccggatgtagtcgttgaactctcctttctgcacggtagcgatcgtaatgcgttctttctccactttcagggaagaggaagtatcacgaaaaagaagccaaagcaggcaaagcagcccgacggcaattcctatcaaggaatagatgtgtttcttcttaaactgggacttccgctcaatacgggtgtccatgctattgattgccattcttgttgtatttattcggttcctaaaaatgagcctgtgcggtagaagtctaccgtgcggcttttcaactcatactgcaaacgggtgcgcgacagttctgccttggccagtatatagaggttccgcttctccatcagttcgaacacggagatcatcccctcctcccatttctcctcgctctctttcagcgtgacggtggaagtgcggagttgttcgaccgcctgacggtgttcctcggcggcagcccggagtgaaaggcaggcgtcgtctatctccttgtagaggctgaggcgttgctgctcgttctcgttccgtatcctttgcaggcggaaacgttccttccggacatctgtcaggcgggaaagtccgctgaacagaggcagcgagacgctcacgccgatatatttgttcatgttattcttcaactggtctttgatcgggatgatctcgcccaggtcatcccgttccgtgtcgtagtaaccggaatagaggctgaattccgccctgatggaaggagaaaaagccccggacgctattgccagtgacttgcgggaagctttctccctcagttccatagcccggaattccggcagggatgtttcggaggcggcatagatctcgttggattccagtacaggaagcacgggaagttcgccctccccgccgggagagatcgccagcgtatcggtatcccgcatattcagcagttccttcagggcaagtaatgagaggcggcaaccgttcgccttcaccgtctcctggtaaatatcagattgcaggcgcgccttcacctcctgcaaatcagaaggggaacgcatgccaagatccacatattcgagcatctgctcgtgataacgttcgctcaacttccgctgctcgacagcaagctcgtacatcttcttatcgaagcagaggcgatagaaagcatccatcacctcgaaggcaatccggttctcctcgatctgctccgtgaggccgccgatctgcttgttcagtttgcggaactgcaaccggttgacgcgcgtaaagccgtcgaacaccggaagcgagacattcagccccatcgtgctctctaaaaaggaagaggaagtatagaggttcgttttcgggtccaccgaacgccccaaacgtttgcccaatgcgccggtagcacttactgagggcaggaaatcaccataggcggcggtaaggtcttccccggcaatccgtgtatccaggcgactgttccgcacgcggtagttctgttcgacggcatagcgcatgcagtcgtccaccgtccagccggactgcgcccgcaggtttcccggcgaagccaggaagacgagaagaaaaagagacaaacctcgtttgatcgttatctgtgcattcatcatgacagaaagaaagcaaacgacgtgccagaaatgtaacattcagactatcaaaagcatttcaaaaacacctctcgccaaccgtccaattttttgacgcccaaacgtccaactttttgacacaggtgtcctcctgtcgctcatcgaagcatgacaagtgccaaatacaacacacaaaaacaagctttacccctcatccctgagacataaagcctaaacacgtaaatcagttattataaaaaacgaagcagtgttatttattgtgtctataagtatactctttttattttccgcgggcaaaggaaaagcatacatattgcaaagatatgacaagagaaagacaatttaattgaaaatagagaaccatggtttatctgaagcaaatcaaactaatcaatccggatatccatacgaacgggagatcatctctcccaagcatttaagatttccgccacatagacgttatgcggattccctgccattgcgctgtaccatttctcgtataaggcaggatcaacaaaatgatccttatccatcttagtcacgtaaagggttttgcattcgagcgtcaggcgcgattcctcgaaacaaggattacccagatcggtaaaataaggcgtcaaacctgtcgctgccaccttgtcgatatcccgtcccgatttcgccccgcaaatcttatgggcagtcttatgctcttctcctaaaaaggacagcgtgaaagctcccttcgcatcgacaaactcgcgggtataacgttccggacggataaagacgaacactaccggcttgttccacaggaagcctacgcccccccaactcgccgtcatcatgttgaacttgtccttgtcgccggcgcttaccagcatccactcttttccgatgatctctataaaattgtctttgaccagactcggttctattgccttcataatttcacaccttagttaataatctttcaaagatacgaaaatatttatttgtgtgtgcaaaatttaatcttcttgtccatacagaatattttctttaggtttgcatctcaatattcacgtaattatcaagacgataaactgccaaatggaaatactgaacaactggatcagcgggattaacgacctcctatggtcgtatgttttaattatcatgctgttaggatgcgccttccggttcactttcaaaacccgtttcgtccagttccgtatgttccgggagatgatacgtgtgctcggcgactccgccaacaaagcccatgaaggtgaaaagcacatctcatccttccaggcattcgccgtatcgcttgccagccgtgtcggaacaggcaacctggcgggagtagccacagccgtcgccgtaggaggtccgggagcagtgttctggatgtggatcatcgccctgttaggttcggccagcgcttttgtcgaatctacactcgcacagctttacaaacggaaaggaaaagaatccttcatcggggggcctgcctactatatgcgatacggattgggactgaactggatgggcatactgttcgccatcttgatctccgtcaccttcggtttcgcgttcaactcggtacaaagcaacacgatttgcgccgccatgcaaggttcgttcggtttcgatccgaggatcgtaggcgcggtactgaccgtactgacacttgccattatcttcggaggaatccagcgaatagccaaagtcagcagcgtgatcgtccccgtaatggcattgggatacgtggcgctcgcctcggggatcgtactgttcaatataacggaactgccggccgtcatcaaactgatcgtaagcagcgctttcggatgggaacaggcggcaggcggtacgatcggcgccgctctgatgcaagggatcaagcgcggcctgttcagcaacgaggcaggtatgggatcggctccgaacgtagcggccacggcatccgtcacacatccggtcaaacagggattgatccagactctgggtgttttcaccgacaccctgctgatctgtacctgcacggcttttatcatcctgttcagcggggcgccgttggacggttcggtaaacggggtacaactgacacagcatgccctgacgctcgaagtgggaaaagccggagggatattcgttgccgtagcgatcttcctgttcgctttcagcagcattatcgggaactactattacggggaagcgaacattcgtttcatcacaccgaaaaaaagcgtgctctatatctaccgtctggcagtcggcggtatggtgatgttcggggcgctagcaagtctggaactcgcctggagcctggcggatatcacgatggctttcatgacgatctgcaacctgttcgccatctcgttactgagcaaacaggccttcctgctgctgcacgattacattgctcaaaaacgtagcgggatcaagagccctgtgttcgacaagaacaagctgccggaactgaaggacaaggcggaatgctggtaaacgcttcttattggtagatcagactgaacaaccgttcaggtgcaaagatctcgttggcgacctctcgtatctctccggcggtcagcttctccaccttggcgaagacttccggcagggtgtcgtagcggttataatggagaaagctcttacccagccccaaaaacaagccttcccgattatcgccggagacgcccaattgtccgatcacctgcttcttggccgccgccaactgggtcgcggtcagcttcacctcacgcagcttcgccagttccttgtaaacaagcctgatcgccttctccttgttcttcggatcagtcccgaagtagatgcttgccagccccgtatcggtataagaagtcacgttcgattcgacgttatagacaagcccgttcttttccctgagagagacattcaaacggttgttcatgcccggccctcccaagaggttattcagcaagaacaacggcaggcgtttctcatcgtgcatgctgtatgcccgtcccccgatcagcacatgcgcctgatgggtatccttgtgtatttggcggctgacgggaaggagctcgccgggtgccgtccgattacgtgccgccatcgggaaagcgatatccgacagggtgctttccgccatctgcacgatcttcttgaacggaatccggcccatcgagaagaacaccatgttttcgggggcatagaaccgcctcataaacgacttgccggactcgctgccgaaaccgagcagcgactgctcgtctcccaagatgttatgtcccaacgcatgtccgtcgaacagcaaattctcgaattcatcgaagatcagttccgaagggctgtcctcgtatgaattgatttcgtccaggatcacatccacctccttctcgatctcctgctccgggaactgcgaatggaacaccaggtcggacagcagttcgaaagctctccggaaatgctcttccataaaaatagaatagacgaaagtctcctcctttgtggtataggcgttcagctcccctcccacattctccatccgattcaggatatgccaggacttacgcttttccgtccccttgaatatcatgtgttcgacaaagtgagccaagccaaattcatccatttcctcatcccgtgtcccggcattcacggcaaacccgcaatacgacaccggggatgcagaaggaagatgtacgatacgcaaaccgttcggtaaaatatgtgagaagtaatctttttccatgatccattcattaggaggcacaaaagtacaaaaatataggtcattccatgtgcaggtatcattaaaatagatacttttgcactttgttaagttcataacaccatatagaatcattttaaaggctatgataaacgaagcaatctcatccattctgcaacaggaagctgaagcagtacgcaatattccgataaccgacggctatgaagaggctgtgacactcattgtgaaacatgtacacgaactcggagggaatctgatcaccagcggtatgggaaaagcaggacagatcgccatgaacatcgcgaccaccttctgttcgaccggcacgcccgcctacttcctgcatcccagcgaagcacaacacggcgacctcggcatcgtccgcaagaacgatgtcatgctgctcatctccaactcaggcaagacacgcgaactgctcgaactggtggagctgacacgcggtctcgtaccggagatgcagtttatcgttatcaccggcaaccccgacagcccactggcagccgaagcgacgatctgcctgccgaccggtgcgccgaaagaagtgtgtcctttaggcctcacccccaccacatcgaccacggtcatgacggtgataggcgacctgttggtagtcggcaccatgaaacgcatcaacttcggctatcccgactatgccaaacggcatcacggcggttacctgggttcgaaaagccgcgaacagtgtaaaaccgtaaacaaataaagagcatgaggaaggtaatcggcatcggggaaaccattctcgacatcatcttcaggaacaaccgaccccatacggcagtgcccggcggatcgaccttcaacggcctcatctcgttaggacgcctgggtgtacctgtctctttcatcagcgaagtgggaaacgaccatgtcggcgacatcatacgcgacttcatgaaggaaaacaacctttccacccgctacgtcgaccgtttcccggatggcaaaagcccgatttcgctcgcgttcctggacaacgacagcaatgccgactacactttctacaaggattatccgaagcaacgcctcgacgtgcccctgccggagatcaacgaagacgacatcttcatctacggctcctattactcactgaacccggcgcttagggaacggatggtggaatttctcgactatgcacgccagcgcaaggcgatcctctactacgacccgaatttccgcaaggcgcacgcccatgaagcgatacacctcgccccgacattgctcgaaaacttcgaatatgccgatatcatacgcggctcggacgaggacttcctcaatatcttcggggaggccgacagtgaaaaagtctacaccgaccatatccgtttctactgcgaccgtttcatcaccactcacggagccggaggcgtgaacctctaccacggcgacctgcgccttcatttcgactcgccctccatccgcccggtcagtacgatcggagccggcgacaacttcaatgctggcatcctctacggtctgttaaaaaataatgtccgtcaccgtgacctcgccaccctcccgaaagagacatgggcgaatatcatccggtgcgggatcgatctggcaaccgaggtttgccgcagctacgacaattacatttctaaagaattcgcaacctcctacctctcccagtcttaaatatcattaaccgggaagataaaggggtataaagacacgtgtttttcactatctttgctttgcatgagtagtagaagtatgatattgaaacggattcttttcttgttcaccagtgtggccttattggcaggatgcagctccggcagagcacctgagattcgtgccatatgtctgcgtgacgacatcggcaactatattatcaaatgggaaacagacccccataccgacgggacgatgaaactttatgtatccgacacccccaactccttcgacatgtcgcgaccgtgcagctatgccgacatcaatgacgggagagtgacctacatcacgaacgacaacatcacccgcaaatatttcctactgtctttcaacgacaaatattaccgcactgtcggcgcccgctcggtacagatggacagcgtccagaacctgcgcgacataggaggctacttcagcgaacacgggaaccgtatgaccggctggggcaagatattccgctcgggcgagctcaaggcacttagccgcaacgacacgatccggctggataacctgaagatcaaaactgtcatcgacctacggggagaagacgaaatagccctcgctccggaaaaatatgcaggggcgaacatcatctccatcccgatcccggtaaaaggcaaagaacagatcacccgacgcctggaagaaggacgcatacgcaaaggcgacgggctcgtgtatatgcaggacacctatatcagctatgtgacggacaacagcgaacaattcggcaaagccctgaaagtctttctcgacaaggacaactacccgatcctcgtgaactgctcgatgggaaaagaccgtgccggcttcctgacggccatgctgctgacagccctcgatgtgccggaagaaacgatcatgaaagactatatggcttccaacaaccacatagacctgcgcagccttgcctatatggcacgcaacctcaatacggacgcccaggaaaccatcaccgtgctgctcggtgcaaacgagacatggctggatctggccttccataaaataaagaaagaatatggttcgaccgacaaatatctgtcgaaaggattgcatctcacggaaaaagagcgcgatacattaaaagatatcatactaaactaaccggtatccaaattatttgcgtacctttgtccccactctgaatttattatatatacatatatcacattttgaaaacatttgaagaattaggagttgccgcaccaatactgaaggcaattcaagaaatgggctacgaatcgcccatgccggtacaggaggaagtgattcctttcctactgggagatgacaacgacgtaattgcattagcacaaacaggtacgggaaagacagccgctttcggccttccgatcctgcaaaaaatcgatgtgactacataccacccccaagcactcgtactctgtcccactcgtgagctatgtttacagatcgccgacgacctgaacgactactccaagtatatcgacaacctgaaggtcctcccggtgtacggaggttccagcatcgagagccagatcaagacgctgaagcgtggcgtgcacgtggtcgtagccactccgggacgcctcctggacctgatgaaccgcaagacggtagacctcagcctggtgaagaacgtcatcatggacgaggcggacgagatgctgaacatggggttcaccgacagcatcaacgccatcctcgccgaagtgccggagaatcgcaacatgctgctcttctcggccaccatgccgaaagagatcgccaacatcacgaagaagtacatgaagaatccgaaggagatcgtgatcggcaacaagaacgaaggaaacaagaacatccgcgatatctattatatggtacaggcacgcgacaagtacctggctctgaaacgcatcgccgacttctacccgaacatctacggcatcgtcttctgccgtacccgcaaagagacgcaggagatcgccgacaaactgatacaggacggctacaacgccgactcgctgcacggcgaactgagccaggcgcagcgcgactacgtgatgcagaagttccgcgtcaaaaacatccaactcttagttgctaccgatgtggctgcccgcggcctggatgtggacgatctgacacacgtgatcaactacggcctgcccgatgaagtggaatcctacacgcaccgccgtggccgtacgggccgtgcgggaaagacgggtatctccatctccatctgccacgtgaaggagaaaggcaaaatccgcgagatcgaaaggatcatcaacaagaaattcgagaaaggcgaaatgcctaccggacatgctatctgcgaaaagcagcttttcaacctcgtcgaccagatcgaaaaggtgaaggtgaacgaggaggagatcgcctccctgatgccccaaatctaccgcaagttggaatggctggacaaggaagacatcatcaaacgtgtcgtttcgctcgaattcaaccgtatgatcgattactacaaggacgccgacgagatccagcaggtagacgaacgttcctctcgcagcgaacggggcgaacgccgtgcacatgcggccgaagagggctattcgcgtttcttcctcaacttcggcaaggccgacggcctctatccgaaccaactgatcgaactggtcaacaaatgtgtgccgggcaaggtgcgcatcggcaagatcgacctgcgcgaaaacttctctttcttcgaagtggaagagggtgaagcccagcgcgtgatggacagcatgaacgggttcgaagtggacggacggcgcatctccgtcgaacctgcacagggcaaaaaagaagaaggcggacggcgcagcgatgacggctacaaaggcaaacggggttccaaagacagtggacgccggggtggagaccgttcggaccgcaccttccgcaaagacgaacgcgacagcgaccgcccgtggaaacggactgccgccgcacgcgacgctcgtaagaaaagacgtttctaatcctcctccctcacgctaacagaaacaggagaccgcagcatacatcagcaacccccagccggcaacgacggggagttgctgtttttgtttccgcttcccgtcatgtctctctccgtatccccgtaccccgagagtgtcaacagggctcccaaacaccccaacacgacctccgaacggccctcccacaaagccagcaggcccaataccatcaggtacaagcgaaggcaatgcgggttgcacaatcgctgatgactgatgatttgatgattcattacttctttcccttgccgggggatgccccggcaagggaaagacatcatttgtatcttcatgccaccatcttcgtcaatacgcaaatcgcagaggaacggcgcaattatcatccgttaccggaattgttgcgtaagttgtcagtaactcactatataatagtgtatttcgctattcttcccaagctccgataccaccaattatgcaggatgacgaatcggtaacgtagcaaagtcttaacttggttcagacttaacttttcccgtcatctggttacagaaactattttctcaaaagcctatttctcaataactttgctctacttttccatatctcgccgattattgctaactttgttatataattatgacgaatttaaacgtacgtttttttgtcattttgaaaaagcctcctatcttatttattcccaataatatacaagcaaaagcaggacaaaagctacccctaaaaacagggcagaaaatgaactttccaccagtagataaaagactttactatatatattgtaatcaattgtttagagacattttccggcaagccccgacctgtcccttttttgcactttttccaaaaaggagggtaaaccccacagaggaactggaaaagccggatatttattcatccgtctgctgaagcagacagcaaaagacagtgctttatatcttatccattcttcaacacatcgtccttgtccggtgcactgggttcgggtgtagattcggggttgaaggggttgaagtagtagatgcctttttcaccgaggaattgcaggaagtaagggagcttctgcataaagaggctgcattccttcgacttggcaggagtccaggcggattcggcgacagctaccaggcgggggaaagtcatatagtccagacgcttggcatcagcgacccgttccgtccaaagggagaactggaggcccatcacctggtcttcataatcgcgtgtcagatggatgatcggttcggggaaacggtagatgtcctcgatcgtgttgtaaccgccccacacacggcccaccttatgaccgccgtactggataaagtcggcatacaacggacggcgcggggtcataatcacccggtagccgttttcgagcgctttcaccaactggtgtttgcggtcgtgacgccaccacatgatgacagccttgtcgggagagacaccggcatcgatcatctcgtcccagccgatcatggtcttgcccttggaggcgacaatatcggcggcacggcggatgaaatactgttcaaggcccgtttcgttacctaagttcttatctttgatgaactgctggatttcgggatcggtgaaccagctctggttgccgtagtgcacctcgtcgcctccgatatggatatagggagacgggaacagggcgacgatctcgtcgagcacgttgctgataaactcaaacgtctcttccttgcagggatggaacgtgaaatgttgccatttgccctcgcctccaccggagatttcaggataggaacggcagacagcagtagcatggcccggcatgtcgaattcgggaacgaccatgatgtggcgatcggctgcataggcaacgatctccttgatctcttcttgggtgtagaacgtagcgggcgctttcgggtcgtgccagttgccgacagccccttcggtggtcagcttcggataacgcttgatctcgatgcgccagcccggttcgtcggtcaggtgccagtggaagacgttcaggcgaaggaacgccatgatatccagatattgttttaccttctctttgccgaagaagtggcggctctcgtcgagcatgaaaccgcgccagccgtagcggggctgatcttgtatcttacaggcacgcacgttacctttgccgaaacgggaaagttgcagaagggcttccttcgcatagaacaggccggcttcagaagaggcttgcagcaggatgctgttcggttcgacgacaagcgtataggcttcatcggccatcttgcaatcgtttgtcagttccagacggatggttccgctggcgggtgacgactgcaaaccggcttctttcaactcggccggcagggcggcggctaacttgtcggcatacccgccattgccttgtacctggagattctttccgataacgaaagagcctttcccgttctgcacttttgcgggtgtcgggaacaaaggttgttgtgccatcatcggcaacacgaatagaaatagtaatgtgcttaaataaattagtttcttcatggcatatttatatttaatcatttccttacagggatattcctcttttaccgggggattaatcccccggcaaggggtagcaaatatatgaaaatttcatatctttagccacaaaattaaagataatgccatgaatagactaattatccttcttattgtacttatctgttacgggaacagccttcgggcccaggaaatcgaatactcccgaccggtcaacactcctgaaagttgtacaagcatcctggtcggcaagaaagcatcggccgacggttcggtcatgaccagtcacacctgcgacgggaactatcgcacctggatggagatcgtcccggcagcacgctacgagcgcgacacgacagtcgccatctataacggccgcatgcacaccgaatatcctgccgatcgcacgaatatggaattgaaagggacaataccggaagcccgctcgacctaccagttcctgaacaccgcctacccttgcctcaacgaaaaacagttgggtatcggcgaaacgaccatctccgggcgcaaagagttgcagaacaagaaaggtatgttcatgatcgaggagttggaaaagatagccttgcagcgttgcacgacggcacgcgaagcgatccggctgatcgggcaattggttgccgaatacggatacggggattcgggcgaatgcctgacgatcgccgacccgaacgaggtctggcatttcgaggtgttcggcgaggggccggacaagatcgggggtgtatgggcggctgtccgcatcccggacgatcatgtgggggtgtcggccaatatctcgcgtatctcgacgctcgacctgaaggacagggataactatatggcttccgaaaacgtattttctgttgctaagaagatgggcttctgggacggcaaggagccgttcaagttctggaaagcctacagtgggggtaactatttcggcgaaccgaaggcattcagcatccgcgagtatttcattctgaatgcgcttgccccttccctccaactgtcgtacgactcggaagagctgccgatcagcgtgaagccggacaagccggttgccataacggatgtgatggcattgctacgccagacgtatgaagggacggaatgggacatgacgaagaatctgaaagtggctgtcaagaacaaggagacgaaggaaacggatacgatcacaagtccggcggctaacccctggatgggaacagatatgctgaatatgctgaacggcgtgaaggaagggacggtgacacgcaatcgcttagtggcggttccgcaatgttcctactcgcacgtgatacagcttcgcagttggttgccggatgcagtgggcggcgttgcctggctgtcgttcgacaatccggggcagagcccgcgtatcccgatcttctccggaacgaccgacctgccggctgctttcggtatctgcggacaacaccgccaccgtgaagatgccatcgtctggaaataccggacggcaaacaaactggctacggtccgctggggattgaccaaagagaagatcaacggcgcggtcgcccatttcgaggaaaagggcttatccgaaatgcctttcgtggaaaaccgctacaaagagttgcaggacagcaaaggggaagagaccgcacgggctttcctgaccggttacacggccgacttcgcaggagcgacaatcctgcgctggcaggagatggcggacgagttctggaagatgttcgcgaggggattctgaacaattgaccgatattcatataatagataatagttgcttttcaagacacgataattaataatttaatctttatatacatgaaatcacttattctatcttgcatgctggctttctctgcttcggcaacgttcggtcaggggtaccagtttacggaagtggtaacggttcccgctaccccggttaagaaccaagcggcaacagggacttgctggtgctttgccactacgtcgtttatggaatccgaactgcttcgtatggggaaaggcacgtatgacctttcggagatgttcatcgtccgccagaaatacatgaaccagttgcaggacaactacctgcgtcgcggggacggtaatatcgggcagggcagcctttcgcatactttcatgaatgcgtaccgccaggtagggatcgtcccggaagaggtgtacacgggtatcaactacgactccgagaagcataaccacagcgagatggttcgctacatgcacgccatcgccgatgtggcagtgaaggcgaaacaacgcagtccggaatatgacaagctgattgctaacctgttcgacacctacctgggaaagctgccggagaagttcacgtataaaggaaaggaatatacgccgaagtcattcgccgaatccttaggactgaatatggacgactatatcgaactgaccagcttcacgcaccatccgtattatgtgaagttcgacgtggaagtgccggacaactgggaacattccctgatgtataacctgccgctcgacgagatgatgcaaacggtggattatgccctgaacaacggttatacggtctgctgggacggagatgtgagcgagaagggtttctcctttacgaacggtgtcgccatcaacccggaagtgaagaaggtggaagacctgtcgaatacggatcgcgcacgcttcgagaaattaggggagaaggaacgcttagaagaggtcttcaagttcgaacgtccctacccggaaatcaacgtgaccccggaagtgcgccaggccggattcgaatcattcgtgaccaccgacgaccacctgatgcacctgaccggcatcgccaaagaccagaacggcacgaaatactacatcaccaagaactcatggggaaccgaccgcaacaagttcggcggctacctgaacatgtccgagagcttcgtccgcgccaaaaccatctatgtgatggtccataaggacgcgataccgaaggcgatcaaggggaaactccatctttaaacaatacgtggagctgtgtcaaaactgccccgttcccgcgcttgacgcgggatcgcattagaactgaccctataaatatctgattaataaggcctgttcttttgcgaccccgcgtcaagcgcagggacaaggcagttttgacacagttccatgctatcttctcttattaatttaatcagaaccgaatcttcatctcgccatagcaaggcaccacctccaacgtcttgcaatagttgccccaggcaatctccggataatcccaacgattattaatgtaaagcatcaactgcccgtctcctcttttggaggtgcggcaagccagggatgcgtccgatgagcaaaccgtaagccctgctcctccccctgtagcggaaagggtatagcgatagatgttctccttcataccctttgccatttgcgtcaacggacggtcacagtttgtaccggcatccgcccaatagtaatagttgtgcgtatcggccaaccagggttgagcagggttctcgccatatcgcacttgcttcgggttataaagggaagtctcgcccgtgtttccggcaaaagcgccttcggggtaacagctccacatacctttacgctcccattgcagatagtccagacgttcgggcaggtagaaagacaagcccgtctcacgcagatatccgttcggctgtcccgcaacgacatagctgacattcatttccccggcgggagatatccggatcaggatatccgtttgcacatcctgatagaagccggagagggcgacttccaccgctccctctttgcgggtataggtcaagctctgcttcttccaatcgctgtcggaggtcaggaacttccgggcactcttacgcacttcggctccagtcagatggttcaggttgatgtcgagatgcaggaacgggcctttctcgatgatgacctgccccttggaggtcgcgttgcagatcaggccggtttctttggagaaagggatctcgaaaccgtctcctttaatcgtcatcataccggcggtttcctctaccagcaacacaccgtttaccggagatgcttccgaatcggcaaggcgaacgtggtaatcgctgcccaatgaaacttgttcggcatccaataactcacccgtagctgtatagaaacaaattgacaacagttcgccttcctcccaagcctcggcagggattaccaacagtcctttttggtgaggagcgatggaaggagcgggaagttccttctccacacctttgtaggtataacgtatcttgatctcatccaggtcagtatggtcgaagcggttgtacaacggaagcaacaaacgttgtccggacaggaaggaagccacctcggtcgtcatcaggcggacgggcgaataggctttcttggtagcccagaactccggtttctcacggcgccagacatcgacgatcccccactctccgtagccgacgcatttaccctgataatcctccggcttggcggtacgggcaaactctttccagaaggcagtccctactttcggttcgggcagcataaacgtttcatccacatatccccagatcgcaccacccaagccgccgggagcatcaaagaggccactccacatcctttcgatcgaatgcccccagaactcgcggatattcggatcttcctgcaaggtagcgtaggtgtagcacgccggatgcgcccattcgtcgaacagggcaggtatcccctctccctggaaaccatgggtagagcggttccattggttcaggtttccgtttacatcctggtagtgcatgctcaggatatcatagacaggctccttctcgccgaccgatccgggatagctgaatataaccgggcgagtcttgtcggttgccttcacccaatcccagcattgctggaagttcgtgccgtacacgctttcattgccgatcgaccagaacagaatggagggatgggaacggaacgacttcaccatctcgcggcattgcgagagatagcggggcgtaaactcggcactgtcctgggtcttgcccggcgcatagttcttctgccggtaggtatcgacaaagcagacagccgtctcgctctccacatagatgccatagcgatcgcaatactccagaaaacgttccgtgggaggataatgcgaggtacggacaaagttcatattggaacgtttgaagaggatcacatcgaggctgtccagttcggcagtcgtcgtgcggccgagtgtcgggtggatgtcatgccggcaggctccgcgcaacttcaccggcatgccgttcaccaacatgcggtctttctctatcttcacgtcacggaaaccgatacggcggtcgaaacgaccgatctcctttccgtccttgctgagggttacggtcagcgtatagaggttcggatgttcggcatcccacttcaaagggttcttcacaggcagttcattcatgttcccgccctcttttagggggaaccgggattgcgccaacggatagcgtctgccggacgggtcggccagcgtataggcgacttccgcacctccgacaaccgggctgctgtagccgatcttcaggacggcatcctcgtaagcagcatccagatgtgtctcggcgtagaagtcatacaagcaggtttcgggtaatgcgaacaaggttacatcgcgcaggattcccccgatcggatgatgggcatagccggaggcataggaaatatcgtccaggcgatccgtcacttcgaggcgaatctcgtttttctttccgggacggacgaagggggtgacatccgtatcccaacgggtaaagccgccatgatgttcgcggacgaacgtgtcgttcacaaacaggcgggcatagctgtagacgccgtcgaaacgcaggatcgtatgcttgccggcgtaatcggccgggacggtgaacgacttccggtaggtgaacggcttgtcgtgctcgatggcatagccctgcatggcaggctcgccggggacctgtatcttgtcccacttgctatccggggaataccggaactgccaggttccactcagcaggacggcaggcgtttcgacaccggccaattcctgcaagacaggataggaggcttcatcgggaagcctctctacctgtgcgaatgctttcgttcctgacagcaggaagctgcaaccgaaagcgaataggattgtctttatctgtttcatttatgtgcctattattacatgtgtataaatttaccaccaaaagtagtaaaagcctattaatatcgccagtatgactaccgacattacattgaacatccggccggtatggaacaaagccgggtcatggcgcgtataagcgttggccggctggtcctttttccccagcaggacgatgagcgcgcagcacatcaggaacacaagccccatgcggtccatccagggcaatccggggaagaggaacttcaggccgaaggagaagacgaacgagcccaatgccgccgccaacgccccgtttgccgtcgcccgtttatagaagaagcctgccaggaagatcgacagggcgccgggactgacaaagccggtaaactcctggatatactggaacgcctggtccaaccccgacagcatcggggcgatcagcacggctattaacaacgagccgaagctcgcccaacgtccggtatggaccagttctttctgtccggcctctttccggaaataggaacggtagatatccatcgtaaagatcgtggagatactgttcatcatcgaagcgagcgaactgacgattgcggctgtcaaagcagcaaacgccacccccttcacccctaccggaaggaggttgccgagcaaccacgggtaggcttcgtccgatttctctaacggagcctccaacgcaaaggcggcaatgccgggaatcacgaccaaaagcgggatgaacagcttgatgaaaccggagaaaagcatcccgttctgcgcctcccggaccgatttggcggccaacgcgcgttggatgatatactggttgcatccccagtaataaaggtttgccacccagagaccgccgaggatcacggagatacccggcaggtccttataaccgggatgcgacttgtcgaggatcagatggaacttatcgctcgcctcgccatagaggttgaccattccctggtacacgccgccaccttctccgaggaggtcgagggcgatataggtcgtgaccagcccgccgccaaccaggaacacgacctggaccacatccgtcagcgccaccaccttcaatcctccgtagatcgaatagataccggcaaaggccgccagcccgattatgccgtagagcatcgggatccccatcaccttctcgatcgtcaaggctcccaagtacaagatggaagtaagattgataaagatgaagaccgccagccagaagaccgccatcaccgtcttgacgcgcttgtcgaaacgctcttcgaggaactggggcatggtgaagatcttcttctccaagaagatcgggatgaagaacttcgccacgaggatcagcccgagggcggcgatccattcgtaggtcgccatcgccagcccgatggcatagccggagccggacatgccgacaaactgttcggcggagatattggaagcgatgatggaagcgcctatcgcccaccaggcaagcccgcgcccggcgaggaaataatcgccggcatcccgctcgtcccccttcttgccgcgtgagacaaaaaggccgacactgaggatcaggaggcagtaggctataaagattattaagtcgatcgtgttcatggtatctgttttttattcatcctgcatcaacgccgagcgcccaccgtccatcaggatcgtcgtcccgctgataaaccgggcatacggggagacgagatagacgcataacgcccctacctcctcgaccgtcccgatccgtttgacaggatgcaggtcgatcgtccgccggcgttccgcttcgggatcgggaaaagagtcgaaccaagtgtcgttgcccgccgtatcgataaatccgggagccacccccaccgtacggacagccggcccccactcgatcgccaggctgcgcaccaggccggtgatagccgttttcgtcacgttataagggaagcatccggggatggaactgaaagcatggttggaggtcatcaggagcaggacaccttcgccgctcttttcgagatagggtttgcagagccgggccagacgccagtgggaagccaggttcagatcgaggttgtaatgccaacgctcctccgtgcaaccttcggctccctcgaacacgttcatgccggcattggagacaaccatgtctatacgtccgaaggtacggaccgtatcttcgacgaagcctttcagctcctccgcatccgtcacatccgtggggcggtagaacgagcgtacgccctcctgctctaccgcctcgcggaaagcctgcacgctcgcgtcgtccggagacttgcgcgaacagcctgccacatgggcgcccgcccgtgcgaactccctggcgacgcccagcccgatcccggaggagactccggtgaccaggactaccttatctttataatcgagtacaaagctcatagggatcagatataaaagttatcgggagcatccatcgtgatgccggggtgtttctccatctcctcttcaacgaggtccacgcccaagccggggcggtcggacaggtgcaagtggccgtcatagaccatctcggctatcggatgatcgatcaccgtgtcgcgccaggggacatcgttgaacataaactcctggcggaagaagttcgggatagcggcgcatacatgcgaagaggcgagtgtcgagagagggccgttcgggttatgcggggcgatcagaacgttgtaggcctccgccatcgtagccatccgcttcatctcggacggtccgccgcaacgggtgatgtcgggcatgatcacgtcgcacacatgcttttccaacagcgaacggatgccgaaacgggtgtaatggcgctcgcctacacagatggcgacatccgacgggatgcgttcgcgcatggcacggagcgtctgcgaactttccgggccggcgggttcctcataccaggtgatatcgagctttgccaagcgttccgccatcttgacggcaacccggtagttcagcatggcgtgtgtctcgatcatgatgtcgcattccgggccgacagcctcgcgcacggctttggagacgttgaacgccaggtcctgctgttccgccgtcagggtcaggttggaggcaaggtcttcgccatagaaatagttcgtgtgggcgagggggtcgaacttcagccccgtaaaaccggcgtccatgacacggcgtgccagggcggcatagtccgcctcgttgtgtccgccgcccgtaaaccagtagttggcatagagcaagatatctttccggtaagccccgcccaacagttcgtagcagggaacgcccaacacctttgctttcaggtcgagcagcgccatgtcgataccgctgatcgcacacaggctggctccgtacgggccgatccagttcagatcgcggtagagcttcgtccagataaaatcggtcttcatcgggtcgaggccgatgatgcgttgtccgacatgcttggcggcttcgaaaacgatcgggctgccgggccagttggtagcttcgcctacgccggtatagccttcgtcggtatagattttcagtaatgtccagttatatttgatgccctggactaaccatacttttacgtctgtaatcttcattgtattgtctccttccttattatatcatcttacattattccgtatgtatcgaaagcgtcgcgggctttcatcccttcctgtatcttcttcaaaaccatccgttcaccacgggctttctccaaggcacgggtgaatacttcttcctcgatctcacgaggcacgacacatacgccgtcgatgtcgccgaccaggatatctccgtcattgatccgtacgccttccatctcgatcggcacacggtagtcgatcacctttccacgcggcgcctggtcctgggcatagggaccgtaggagaagcaagggaagtcgagcgccagaatccccttcgtgtcacgggagtagccgttgacaaccgctccggccgccttgcactggatcgcacgggcactcatcagctcgccccacaaggcataagcaggggaagaaccggaacaaacatatacctcgtcttctttcaaatcgtccaacgcttcgagcatcaggccgaaggagcgtttcagcaccgggttcacccctttctcctttccggcatccagcacatcggcttccaataccgtcatggcacgtccggccaccagcatatcgtcacgaagcgggcggatgcggggaggcagaaactggcgggtatagcccatcttatccataatatcaccgaccactgcggtgtaaagttcttcctttatcaaggcaaacagggctttatcgtctttccattctttcattgtgaattcctttttacagttcgtctttctaccagcaaagatagagcccggagggaagaagatacggcagtaaagctcccggttgcttatgctacgaggaacagaacaagggaaaaagtagagaaaacggcactctctatttcgtcacttcacgcggagagatgcccatttgttgtttgaaaatacgggagaagtattggggggactggaaaccgcaggcaaagcatacctccttgacggacatctccgtgttccgcagcagctcgatcgctttgttgatccggatctggttcaggtagtccagcggggagaggttcaggtactgggagaacagtttgcgcaagtaccgttctccgactccggtttgcgacgcgacatcgctgatcgtgatatcggactggtagttcaaacggatataggagatcgcccttttcaacgaatcgtttgtacaaatcggaagataggcctcatcgagataacggtaaatcaggatcagcagctcggcatagtacatgacaaccagatattggtagtatttgctcttctggttcatctcgttgacaatacgctgcacggcgcgcatgatccggacgttattcacaatcttgatcaaccggttttcttcggaaaagatcgtgacaggcgccagatccttcgtctgcccgtgcccgtccggattgaagcgggagaagacttccggcaggaactccaactgcatcagggtcgtatcttcggaaccggcctcgaaggtatgctcgacattggaacagatcaccatcatctcgttctcgctgaagctgatactctcgttctccagatgcaggatgcaattgcccttcttcacatagttgatctcgatacgcagatgcttatgcggcccgaatgtctcgaacgggcggaacgacacaaagcgaaacacatccgccagccgcttgtgcttcagattctcggtgatgccttccaacattccccataacgattgttcagacggttgttccatacggctctgcatttgattggtgcttacaaagttacaaaaatgccggtaatacccaatagcccgtaaggtattttagtcaccttacggactgtcgggcaataccctatagcctgtaaagacacaggttatagggtaagttaagaggttattccactctcaccacaatctctccaccgatccggtctcctttcttcaacggcttgcggtaaggagcataatagctactgaggaacatctcgtttcctgccgtcacaaagtcggcaaccaggaagcggatcttgtctttttccaaccaggagcgccagtgctgtttgccattggaagggacggtaatcttactaccgtttccgtctttcagaccggcataccaaatgttccggcgggtggaacggaaatcattacttcccagttcgttataatccatactccaagaccaggcaggttccgtacgcggatcgactttcgcagggagtccttcataaaaaaggctggcttcacctaccggacggctgatatggtcggccggataaacgctccacatgccatcccggcgccagaaggtcttatcataagaaacaggagcttcaaaaaccagtccccactgcctcggattcacatcttcaagggcatcgaacgaataggttaccgatagttcgcctcctgcatttattttcaggtcataagagccggaaaactctttataagcgcctgccacctttaccagaacgtcatcaccctgtcggaccgcctctactttttctaccttccagtccgagcaaaggtcattgaacacaggcgtattggcattatgattcgggtagcatccgtcacctgtcaacggcaaggccatcagccacggtccaccgttcaatatttcttttttccctttcttcaccgagagtatctggccggatacacgactgatctcacaactaaaatcttttccggtaacgacatagcggtctttcttttctttcaagcgggtagaagcagttggcaacgcccgcaattcgttctgtacctgtctgccgacagggatcaaatactcatcggcagtaaagccgcggggatcggcaaaagacagatagagctcattcgccttttcgggatgggcaagccggatgcgaagttgtcctttttcaccgggttccaggtctgcgaaggccgttcccttctcctctccgtacgtccacgtgatacgcagttcatctaggtttgtataggtgtaccggttttcaagatcgatgaccagttcgttggctggagatagcgccccggtcgtcacacgaaccggactgtatatctttttcatatcccagtactccggtttcgggcgacgccagccgtcgatcggcccccagggaccatagccgacagcatccccgttaggcatctggaaaatatcgtcgataccggaccagatagaaccgcctaaaacgcccggtgtcttatacatattgtcccacgtaggagccagcgccaatgcccaatcgctacggatgccggggtcagtcaccagttcgctccggttatagacattcaggtggcagtattcgccatacgtcatcggccggtcgcttttggcggcgaccttatatccgttgggacccggataatggatattcgcgatcggggccgtgctgccctggttgttgaacccaccataggcctggtcgtggaacgtgaacggacgggtaggatcggctttttccatatagacctctacctgtgcaaattccttattccagtacgattcgttcgccatcgaccagaagatgatggaaggatggttccggtagaactggatcatctccatattcgcctgcaatacatacggatagtatttaggatcgcggtagttcagcaccttccagttctcattcgcatgatggccgatccaacagaccggtgcttccacttccacgaacatgcccagttcgtcacagacttcgagcagctcttcacaaggagggtaatgggaagtacggataaaattgcagttcgcatcccggtacagctcgacatccttccgttccagggcaggattcatcacacgtccggtcaacggatgcatttcatgccggcaaactcctctcaacttgacagccttgccatttaccagcaaacgattcccttgtatccggatctcgcggaagccaaaacgtttctctatctgctcgacaaccttgtccgaggttccgacttcgattttcatcgtatataaagatggatgctcgttatcccacttatccggagaaacgactttgccagtcaaccaaccgctccaggaagacccggcggtaatttccggaatatgccggctcaggacaacaggcagtccggagagggaaaggcgaaccgatacatctttttgtatctcatccgagctattcgttaccgacaggtagactttcaagtctgcatctttatagtcatcgtccagctccgtcacgatacgaaggtccgacaaatggatatccggaacggcaaagagcgtcactttacgggttatacctcccaactgatgtgccgcatattgagtcaggctccctaacatgtctgccaacgactcgctgcgaacccgcagggccaacaggttctcacccgccttcagccctttcgtgacatccagttcaaaagcagtcattcctcccatatgggaaccgatctcctttccattcagatacacgaccgactcgcaggagacaccgtcgaaacgcagtttcacctgctttccctgccaatccgcaggcaatgtgaatgtagtctgatagcctccgaaaccggcagaatcgactttaaagccttgcatggaccactgccccggaactacgatcggcttccagtcccgcccgttctgtttctgttcataaaaacgggcagcaggcttttcattgaacaaccacgtcccgtttaaggacaggaccggattatagacaccggctacctgatggggcttgatggtatataaaggtaaaactttttccgcacaaacagtcgtatccaccgtataagcctgggtatgcaccagttcctttttacgttcttccccgaaaggtttcagctgggccggattggacgaatacaggttcagctccgaaacaatcgcattatctcccttcaaggcttcaaacaccaagaccaattgtccgtaggcgtaggctttcttcggcaggtcgatcatgtagcgttgctccttccctttttcaagtacgacgggcccctgcacttcgttgccgtcagccacgatacgctgttccctccggttgtcagccagatagaccacttccatccggtaatcggcctgtatatccatctgatcgaaagcatagatgaccgtcccgccgaaattacaggttttcgcctctttgcttcccgtgaaagaatccggtaatgtatagtcatcccccttgatcaggaaagcttgtgtattcgttactccgcagtcgttcgtagccacccgccgcatctccttgttctgggcctgcaagccaaggcacaaaaagagcataagcccggtattgaacagcttgtttttacatagattgaccatgcacatatttgttttcgttttatatttacactatctgatatgcaaaagtacggacaatcccaacatctttctcctctctattctaattgagtacacacctgccaggaacaaaaaacaggaaaactaacacaaaacggaactgctcccagacgcggcagccgatcagtagaccttaagcttttgcatgcctcctttttcaaactcgatcgcccccggatacgagtttttccggcttcttttattacccagataatccctattcaagactttcggagtctccgctcctccaacaaaagactgatgggaaatagctaggtgcgaccaaaacttgtttatctaaatcctaaacatgcataaagacaacagggcaagcattaccttgctatgcaataaacttattagctttaacacatgacctgccccgaaagtgacgaagaactatgtttcccatttcctctgtcactgtatcactgatttctttttaccagttgatattcaacttatttgattagtgatatatgcccgttttctctatcactacggtatcacaatcctatcactggcaacttggataggaaacaggtattccacttatacatatctgcatattaacatattacaaataaaacaaacgataaacaccctatttccatccctgcaaatcactcgattattttatgtaaaaacggctataaaataggtaaaaccgggtggttttcattgtccggcacggtactttagttgccggacacccccatgttgccccctcttacacccgggtgtaccagttctctacacccggatgttaaggatggcaacatgggggtgtttacgaaattatgtgcttgtctttgctaaaaaaagagagggcttttgtggaatgaagaaccgtattttgccaatttaatacctattatattcgtttttacatttgtttattcgattattttatatgctttttcaaaagctaaagaaggcaatacactggtttccaatcatatgataaaacaccatgttttagaagtgatagagaattgatcatgcgcagtatggacctgcttcgcgggaaaaacccgaatccatttactaactatgtgaagaaagactgctatatttgccttgtaacaatcgttgctgggcaaattatcgtatatacagaagcatatgaacatacaaaaattaaaattactattagcaacagcctgtctggctcccctgccactcaccgcccaaatcacggaaagagaacggccggcagaatggaaacacctcattacaggcggacgctacatggaccgtttcgaagcaatgcccgatggcacgctctccggagagacgtggggagcggacagcgtacgcccccggtatatcgacaacggtatcgaacatcccgacatctcgttctggggaggcaatatcctccaaacgccggaccggaaataccatctgttcgtatgcggatggccggaaagcgcacccaaagggcatatggaatggcccaattcaaccgtttatcatgcaaccggcgatcatctgcatgggcctttcaccatccaagacacaatcgggaaagggcataacccggaggctttcgtcctcaacgacggccggatcgtcgtatatgtcatcgacggatattatatagccgaccaggtcaacggcccctggcaatacggaaagtttacgttcaatccccgcgaccggaagatcatcgaaggactgagcaacctcagctttgccaaaaggcaggatggttcttatctgatggtttgccggggaggaggcatctggatcagcaaagacggcatcgccccttacgaacagatcacggacaagcgggtttatccgcctgtcaaaggagagttcgaggacccggtcatctggcgggactccctgcaataccacctgatcgtgaatgactggctgggacgtatcgctttctaccaacgttccaaagacggcatccattgggtgacggaacaaggggaagcctatgtacccggcatctccttccatcgggacgggcatgtcgagcattggttcaaatacgaacgtcctaaagtattccaagacaaacaaggacgtgtagagcagatgaactttgccgtcatcgacaccgtcaaatgggacgatcatggcaatgacaaccacagttcgaagaatatctgtatcccgatgaacaaggggatgctattatccgtcctgaaccgaacaccgataacggcctccactgaaaccatccgggtcaaggtcctggcggaagaaggcttcgacccgctccgggagatcgatgtgccgtccctgcggttcggttcatacaacgaagtgaacttcggcagagggtgtaaagtggtcaaaaccgaagcatccgaaaaagaccttatcctgacattcgacggtaagggaagcggcatcacaccggatgaattcgctccgaagatgatcggaaaggataaaaacggaaaactgttgttcggatatgcgaacctgccttatgtcgattacaagccggctctattgtcctgccgacgtcccgtttaccgggaaggccggaacgaagtcgaactggaaatccagaacttcggactatcggtatcaggagaaatgacagtcgaaatcaagcaagccggggcaggaatgggccgtcatacggtcaagcccctgcaaccgtatgaaaaagcaagcctcacctttacccctgaaaaggggaaatggacggataaggcggattaccaggtagtcttcctccgggatgggcaaatagtagaaacaaacaatttcaatatctccaaataatcatttataaacatgaaacacacctttatcctcctgctcggagccatgctgtccctacaggggcaagcccaggacaagcagatgcaatttcagaacacgatcaaggtcgaagctggcgacagccatgcggacatcatcgcgaaagccgcccatgtcgtgccttcgcccaaccagttggcggcgttgcaaaacgaattcatcgccttcatccatttcggaccgaacagtttcacccggttggaatggggaagcggaaaggaagacccgaaagtcttcgacctgaaagagctcgacacggatcagtggtgcgaggccatgaaagccgccggcatgaaaatggtgatcctgacggtcaagcaccatgacgggttcgtcctgtggcaaagccgctacacaaagcatggcatcatgtccaccggtttccgcaacggcaaaggcgacatcctgaaagacctgtccgaatcctgccgcaaatacggattgaagttaggcgtctatctgtcaccggcagacctgtaccatatcgaaaacccggaaggactgtacggcaacctcagcccatacaccaaacggaccatcccgcgggaagtccccggacggccttttgccaacaaaacccgtttcgaattcgtagtggacgactacaacgaatacttcctcaaccagctcttcgagatcctgaccgaatacggcccgatccacgaagtatggttcgacggggcacatcccaagcggaaaggtggacagacctacaactaccccgcctggaaaaaactgatcaaggcacttgtccccaacgccgttatcttcggacgggaagatgtccggtggtgcggcaatgaagccggcggcacacggtcgaccgagtggaacgtgatcccctaccaggcaaatccggacacgatgtcgaacttcgccgatatgactgacaaaaacctcggaagccgtgaacagctctataaagccaaatacctgcattaccagcaggccgaaaccaacacttccatccgcgaaggctggttctaccgggacgacacgcaccagaaagtacgaagcaccgacgatgtgttcgacatctatgaacgcgccgtaggaggcaactccaccttcctgttgaacatcccgcccaaccggaacgggaaattctctccgacggatgtagccgtgctgaaggaaaccggccagcgaatccgggaaacctacgggaccgacctgttccgtcaggcaaaaggcccgaaagaggtgctcgaccaaaatgcagacacctatgtgacggccgataaggacggggcgggaatcgtcatctccactccccaacctgtcaccctcaaccgtctggttctccaggaagcgattgccaccaacggggaacgggtagagaaacacgccgtggatgcctggatcgacggaggatggaaagagatcgcccatgccaccaacatcggctacaaacgaatcctgcgtttcccggatgtcacgacggacaagatacgggtccgcatactcgaatcccgcctgacacccgccatctgcaccatctccgcccatcactacaaagcccgtccgccccggttgagcgcacagagaagcatagacggcctggttaccatcgaaccgatggcacaagaattcggctggaaagcacacggtgagaacattgccgagaacctgaacgcaggtttcaagatctactatacgacagacggaacggaaccatcggcaggctctaccgaatataaagcacctttcctgatgggaaacagcgaactgaaagcggtagccatcctgaacggagaaaagggagctatcttgcaggaacggtttgggctggtcaagaagggatggaagatagccgacaagaccgcgcaatcccttgccatcgacctcggcagccagcaaacggtaagcggctttgccttcactccgcaaaaacaaggcggtaagggcacggtagccggtatcatccggatcagcaacgacggaaagaactggaaagaggtggaacgcttcgaattcggcaacctgatcaacgacccgtccaaacgctaccatcatttcaagcaaacggtaaaagcccgctacgtccaagtggaagcagcggaaatcgccgcccgtacggaggctgccgcccttgctggaatagacatcttctaaggctcgtccacaaacagtatataccttgtaaggtaaaatcatatacgttataaacgtaaaagaaaaaaggttatagggtaaaataaaattccctataaccttttttcttttattcgttcctgtgctagcccggaagagcgaagacagaattacatcgcaaaaggtgtagctttcacatacgccttatatcctttgatcatgccggggaatccttcttctgcacggggcaggtagcggaaaccggatatcgtctgctcttccttcaaatcgatcacgacctggtgcggatatttgtctccccgcttcgtgctccaataggtagattcctgcaagtcatagatcttatcggcagtgaagttaccccactgcgtgctttcgctgtccgcataggagatgttccaatgctggcgggggagcggtttgccgtcttcgtccaacagatagaactcggccatagcggcattgtccttgccatcctgtgcatccaatgcttcgaggcagaaatagcggcccttgacagtctgaccaaacttcacttcctgccagccgtttccgggtttcagcgcaccgttggcaaccggtttctcacctttcaggttcagcgtctgcccctcttcacggtgggtagccggggcttcagcccgcaacatatccaagatcggttccttccggccttccactacagccttttccgggcctaacaggtcgaggatgatgatctcgttctttcccttcttcaaccagcatccgggcataaacaaagtctgctgaggtccgatctcccagaagcggcccatcgcctttccgtttacccaaaccatgccttttccccaggtctgcatgtcgaggaacacgtctccgacttcatccagctcgaaagtagtccggtaataagccggtccgtcgagtttgtctcccgctgcatacttcttgtcctgtacgaaagcgtaatcgaccgggaagctgtaaacctgccagtcttccagttcctgtctgccggtgtcgctgatcagttccaccttatccgtaatccccttacggtcgtggatggcaacatcgaagttgacacgtcccatcgcctctaccaggatatccaggcgcgttcctgctgccaaagccggcagaaccaccgtgttttcacctctgcgacgatccagacggcccaacagtttgccatcggcaaagacctgcgcccagtcatgcacctcatcgatcaacagggtcgttccttcctttacggcaggcagagtcgtccggtagaggatcgttccccaaccctggtcgaactgctccatcggtttaatctctttcgaagcctggggagcaggcagattgtcgaacagcggagccacttcgccgacggtgaacgccgggatctcgatcaaaggataagctgccgggacatcgggtatgacctgaccggaatcggcatattgtgtcagcagttcacgtaacttgtagtatttgggagtcgcccaccccgcctcgctgatcggggcgtcatagtcgtaggagctgcacatggcggaataggccgggctgttcgcaccgccccaatgtccgaaagtcgtccccccgtgcgccatatagagcgagaaggagatatggcggtccagcatgtccttgataccggaaaccatcaccccggcatcgcgcgtctcgtgcttgcgtccccaatggtcgaaccatccgctccagaactcgctgcacatcagcggagcatcggggcgtgcctctttcaacttcttgaactgggcatcgatattagctcctgtcccgaagttgatcgtccagaccagatcatccaaaccgttcaactggaaagtagagctccagtcacactggaacaacgggacatccgtaaagcctgccgccttcaccgcatcgcggatattggcgatatacgccttgtcggtagcatatgccccatactcgttctcgacctgtaccatgatgatattcccgccccgggtcacctgcaagtcagccaactgcttgccgatctcgttcatgaacagcttcgtccgttcgaggaaatagggatcgttggtacggagcttgatatcctccttcttcaacaaccaccagggcagtccgcccatctcccactcagagcagacataagggccgggacgcaacatgatatacatgccttctttctgggccagccggcaaaaagcggcaatatcgttctgccccttgaaatcgaactcgcccggtttctgctcatggatattccagaacgcatagatacagatcgtgttcatgccgagtgccttgcacatctgaatacgatgttgccagtattcggcggggatacgggtgtaatgtatctccgccgccttaatcacaaatggtttgccatccagcaggaaggttcccttcccaatagaaaaatcgtgcttctccccttgtctgggactgcatcctgagaacaggaggataacgcagcagattatcaatcctgcaagaatcttgtttacgtgtttcatataaattaattgtattgtactgtcactgttttatctttctctgtttccagaatcaggactccctccttctccagtttatctcccttgttgcccgttacggaagcgactttgcatccttcagggatagccagacgcaacatcccgccctgttcgggcaagatacggacttgccgcacctgccccgccaccttttcggccgagacaaggaaagcccccatagcacgcagtttgtcgaaagatacatcctgccaggcaaccggtacagccgggaacacccggataacgcccgtatggctctggagcagcatctcctggataccggcggcaaaggcgaagtttccttccaaagtaaacggacggtaggtgaatttcgactttccgcttttcgtctggtcgccgttcgcatggaacgtattcgggaggcagaaacattcggcaaaggtgcgcaacgcatcagcagccccttccccgtcgaaggcacgggctttcatattcccgaaccaactataggaatagccgcaccagtaatcaggcccgaaatcctgtagcttcttcaaggtcgcttttatgatctcctgggatttttcaccctggctccagtcaatcagacccaggggatggatggacatggcatgcgagaaatggcggtgcgactcgttgtaaggaaagcctttggcaaaggccagcgcgccatcctcatccaggttcagagcgggcagttgggcaccgatagtcttccagtgctcggcctcatccgtcaacttcagttccgtagccagctcggaagcggcattgaaagcgaagtgcatcagggaaagatcatagttcgtcatatctttgaaccaggcgtctatcgaattatcgaagatctccgggctggaactcagcggtagccgtcgcactccggcaacatcgaccgtggagatctgttcgagataggtcgccacgtccttcaggaaggggtaggcccgctctttcaggaagacgcggtctgccgaatacttccagtgcaggtagaaatgctgtcccagccatgcaccgaccgtcggcgacatagagtactgcacccatccgcccatcggctcgccggtcagggtgcagacgccggggacattcatcccgtccgtcccgaaatactcgcgggtatatttcttatacacgtcacgctgtttccagagggtattcagatagcccatcccctcctgcaaatggttgccggtataggtaggccaatagctcaactgtgtgttcaggtcatggtggtagtctcctttccagggcggtaacataccgttatcggctgtccagactgcctgaagggagatcggataggagtcttcgcgggtagccgccccgaacttgtacatctcgttgttgtactgtttctgcaggagcgtatccggcagcgagacggacgactgtgcccaatagcctttccagaagttcatatgcgagcggtaatctgcctccacgccacgctccatcgcttctgccgtttcctggtcggcccggtcggcggccaaagaagaggtcaggctccatacgccgctgagcgtgccgcctttctgctgccaacggacgaccacatcgtatgaaaagcctccccacccttcctgatggaaagtggtcgtaccggcttccttctgtatcgtcccctgtttatatccgaggcgtcccagggccggaccggcatgcgagttgtcacctgcgacctcgtccgggttactgtagcggggtgcaatgatctccggcgaaaccgtatccggcagattctcgaagacaaaccatccgaccggttcgtcggcatgcacgaacgtctgcaacttcgtcccgttctcccaaagcacctcacaaagggcattattgaggaaaagatgtacggaagaaaccttcccgatattcaacgggaactccaaagccgcccccggtatcttagacggggcaggcaaggcgttataagggtggtcgaacttcttctgcaccggcagataatcccctttcctcacctgctcacagacccaggcaaaacgattgttcggtcctgcaatactatccatcgggcgcaagtcccagagatccgtccgatccagcgaaaaacgtagcacagaatcgcgttgccagactaatgttcctactgtggcatttcccaacggaattccttcatcccaagtcttggccaagtgaccaaactgcaagtcactgcttgtcggtgtgacaggcagtgactccttttcgcaacaggcagccaataggcatgcgcttatgcaagttagccaaaattcctttttcattcgtattaaatcgatattattctttctttgtctcctgcaaagatacggtttattgatttaataactgcttgatagcttcgtccgaacgagtttccgtctcctggattttgttatagtcgaacaaagcatcgagttcgtaaagttgcagggtaacagtcggggcaaaacggtcggaagcgacatagttgcgaactgatgtcagcaattgttgcatggccaggcgtttctctatatccttaaccggatcgaccacaaggacaaacagcttgccgcttgccgcaatctctccgctttcgctttcgagctgccaagtcaacagccctttacggatcgcttcgggaccgaaatgatagatgcccatcttcgcagtaaaggtctccgcatttgtgtaagcacgcttctgaaggcgcgccagtaggacgatcggagcacatgattcacggtatttctcaggggttaccaaccctttgctttcccagaaggcatccaagataccgactacttctcccgcctcttcagcaagatcatggggatgccgccgctggagtacaagaagatgaagaaaggatgattaccaataatactcatccataatctcctgcatccggggcgttgcggcatcggtatcgccaacctcgcgacgcagtttcagcagctcgcgcttcatcttttcgatttcaccggcataggcgggggaattgtagacgttatggtcttcgtgggggtcggacagcagatcgtagaactcccacgacggcgtgacgggagccttatccgatccggtcgcattcagcggatcgccgtagaggaacatcagtttgtagcgatggttgcggatgcccatgtgggcgggacggatcttgtggtgcgtccagtagcggtagtacatggactgccgccagtcgcgcggagtctcgcccttcaggttgtcgcggaagctgcggccttcgctgcacgacggggcgcccaccccggcatagtcggccaacgtagcggcaaaatcaatattgaggatgatgtcggaattgcgcgtcccggccgggatctccttcgggtagcggataacgaacggcatgcgaagcggctcctcgtacatcatgcgcttgtcgaaaaagccatgctcgccgaggaaataaccctggtcggagacatagactacgatcgtattctcggacagcccctcttcatcgaggaaacgcagcaggcggccgatattgtcatcgatggccgctccgcaacgcaagtagtcgcgaatcaacttctgatagattttccggcgcgcatcttccttgtccattccttctatggaaaaaggcagttccggatacttgcaccaccaggaatccgggtctttcgaggcgatcccccatcggcgggccatatcttccaacggttgtccggggaacgtacgcccggattcttccggcccgaactccatcatgtttgccggttcggggaacgtgactccgtcataaatatgtttcaaccgttcggggaaatcccacggttcgtgcgtcgccttgaaatggcaacacatcatgaagggtcggtccttgtcgcgcgaacggatccaccggatcgtcttgtcggtcaccaggtcggtcgagaagcccttctccaccttgccgcttttccctttatcatcgtctatccagccctccgcggtcttgaaaagcgggtcccaatattccccttggtcatggaaaaccgaaaaggtgtcgaaacccgacggctgcgtcttgagatgccatttgccgaaaagggccgtctgataccctccctcctgcatgcgtttcgcaatattgtccaaagccggatcgagcctgtcttcaagcgtatagaccccgttatgatggctataggcgcctgtcatgatagccgcgcggctgggcacggagatcgagttcgtgcaaaagcagttgtcaagcacgcacccctcggccgccaggcggcggatattctcgttcttcacgtattcgctcagtattcctccatagattccccacgcctgcgaggtatgatcgtcggaaaggatgaaaaggatgttcgggtgtccagagtcggcttccggcttttcgtctgccatcgcaggagaggcagacgccaaaaaaccggtcgtgatgattagttgatcgaatgttttcatgacattttttgtttttctttcctacaaaagtaatgaatttaaatagataccaacaacattatcttgcaaatgaaacccctcgtttcatttgcaacatgacaaggaaccttatcgatttccgaaaaaatcatatctataattaattattcatttgctttcaatatggcggagtttcttgtcttctctatttctatttgcttaaatgtatgctttttaccccagttgaaccgataactcacattcacataaaatacatgatcgtttattttcggaccataattccgggaatatgagctatagatatccgaaatatactctctcttttttacaaaagtagaaaatggattacgtgttcctaattcaaaattccaattattaagattatatcctacgttaaaattgtagataagtggagtacgatagaaaactccgacatcatcataattcttttggggagttatgagttgtccggaagccatgaaatttttatatataaacaacaatttagctgaagcataaaaacaattgacatctaattttctccatgcatgtataactcgttttttataatatccggccaaatcgaatgtcaattttccaggtatgacatttagcttcattcttggacctgtcactaaatcaaatccggatttagctatggcataatcatgtataaacaaattccggctttcatcataagatactcgttcataagggacatctgtcgtcacttcaaacgaagtatgataagtaagattgaaaacaggcgtatttaaagaataagtcaaacccgtcaaataaaatttcaatacctttacctctggattacctctgcgtatctgatatttatcaattctttgctctgttaaagaacgatattgcaacccaagatcacccgattcaagagccgtggtaaaacgtatcgaattattctcattaatcatataagtcataaaaagtccgggactgaaaaaatgttgtaaagaagattctttcttattatcgatataagtcaactgatcggcccattgaacagtcattttcaatttattttttaaccgaaaagcatatcctaatgtcaacctcccttctccctttgtttggtaatcatccgaaagctgtccatcgatttcatattgagtatgggcataagtatggtcatagttcaacaggacaaagagaacatcgctttttcgtacagttttcctatacatcagttgaggaattaccctataattattttcttttgcatgtgtattataagctaaagtaattttgtcattttgtaaagcctcatactgtctgtcatacttattctgattgtaatttccacttaaacggaaacgtatatactgttcgtgttttagactcccggtatattctatcctcaaagcaggattaaaattatgagaagaagaattgtcatccactttataccggaccgggtcattgctgtacgtttgcatacttaaatcatcctcatccgatttttcctgattcaagactaaagttgtataaagttgattgtgcttatcatggtaaagataattaaaatagctatttatactattactattttgaggagagggtaaacttgaagcttcattcacgatcgtttcctttgtcgattttaaataagtcgaagtttcatagccacgtttaggagtataattattatagctgtctgaaactgaaacaataaactcggactttttgttaaaaatctgtcctgtagctccataactatcgtttcctttattcaaatgctgttgcccattcatagcgaccatccctcctctatcatgatgttctaaaatatagtcgacaacagaattcgcattcggatattcaggatgatgttgatcataaaaatcaatacggagaatatctttgggattcaggtttcggatctcatcgctcgaagcttcccgtccattgatgaggagcaatgtttctccttgaatagtcgataccttttttgtaaacggatcgacatccaatgtcggtatcatcattaacgccaatgctttataaccatccgatgcatgacgtaactgttctttggaaggaaaatacaagaccttatcagtagtacgcgttatttgtcgaccggtgacaacaacctcatccagcttattactttcttctatcaaaacaatatcacctaactgtaattcacccaaatcgccctttgtatgaaggacatgttccttataaccaatataatttataaccaatttatatccagaaggagaaacaggtgctgttattgaaaaattaccggtactatcactgatatctccctttacaaacactgaatcgtgtatgaaacagcgaactgttgcagaagagaccgcatttttatgttcatctacaagacgccccttcaaacaaatattttgagcctctaataatgtattcaataaacataaaacaattatgaataatgctttcattgtatcctacaaaattttaaaaccgccttgaccatgcttagctcttaatcataaaagaaccttcacataatcaggacagcatgttattccattctgaagtcagaaaaaataaacatacaatactactaataaaaataagcaaatttttattcataactcttacctttctaaattctaatgcaaatttcagacataaaacacaaaaaaaaccggattagaaaaaataagttcagtatagaataaaaaacaaataatttactaattttcagacatataaatctgatctcatacattaaaaattcacttttactttcaaaaaccggattcgaccagacaaaaaaccggattttaccataataatttttcgagaaatcggtctaaactttgcttttcagacacattaaagtatttttcttttatctcggctttctgttttgtgatcgtatctggtgctaagtttagtatagtcgcaattttaccagtttttacccccagtttaaccagacaacagattaacaattctcgctcatccaatttatactgtatgaacaaatattctacaaatccaggaaataccggagaaaaatgctcataaaacacatccttattaaagtttaaaggatacaattgttgtctattatcggatagattaagcaaaaattcatcttgatgaatcaatttttgtatccatgcttcatacatcctggatttttgtttgagttcaccggctacctcttgttcttttcgcaattgttcttcttgctgaagccgcagtgactcccaatccaggctcagttgtttttgcgcctttacatttgcatccagttcttggcttagtacacttctttgtctttccaattcttctttctcttttattgaaagaagaatacgttgctctaattttccatttttttctaatatagactgcaattgtgtatctttctgtctaagtagtatatccttattgcttattaattcctctttttgcttaagaatcgtctctttctctttgagaagtttagattgttcgatattagcctcttcctgttgctgtttgtatatttccagttgagataaattatcattttccaatgtctggattgtctcagtcaaggagtctattaacagatggttctcttccaattgcttctggatagtctgcaaagcgatgtcttttttctccatctcctgcttatcgctcagcaaaagactttcatttttctgcaatagcttctgtatttctttatttctcaatttatgtttactgattatttggaacatgatcacatagactatccctattgcaagacaagcacaaagaaagcagataagcaggaaatcttgcctgctacgagctgtatgcatttgctggttttgcttgctgattaaacgctctttattatataaagcttctactttcgccaatttttgaggttgatatacctgttcgattgaatcccgaagtaaaaggtaacgttcattatatgtacaagctttcttataatcctgcttttttacatataaagtatatattagccagttagcaccacactccacatataaatcagtgctcgcaagagccatctctgcaaataacaatgcagaatccaacttatgtagatttccatataattttccgatagaataatagcaagaatagattgtatttctcttttctgaatagttcaaagaagctttcttgtatgccaaagccttttcatatagttttttttctgtatatatattgcccaaagaggacaataaataagcggtataagatgtaatacctccctgtctagcaagctttaaagcaccatctaaatagtgataagcactatcaagttgtccagactcacgcatacattctccaatattttgcattgtattaattattccaatcgtatccctacatattttataatttcgataacttttctgatagcaaactaaactttctttaaattttctatttttccagtataaagtccctaaatgattattgatacgcgcctccaaatctcgatcagatgtttctcgtaccaattcctttgcctttaagtaagcagttaaggcttcttccgaagcgctcagttctgaaagaaccctgccttgacaataataagcttcggacagtcggtttatatcttttttcttttcgaagtattgtattgcgacattgatcaaggaatccgaagtatgttcgatatagttcttatcacgagcctctgttattaacaaacaccaagtggcataatcgcgctccggcatcttttctggggctgcaacctgttccaacaagaataaagcgctatccggatgttcggacattactttctcggcttgctccaatatagggtgttgctgacttacctgatgacaagaaaagaaaatgataaaagcaagtaaggttaccttgagtatttgtgttttcataaacttagcaattaagtaatcacaaaattaaagataaaattctatttattaaggctaacctgacacaaagttatcattcttctttcactacttcaggcaatagatatccttttacctcacgggagtaaaaaacaatccggcaaacagtatgattcttcctgaatgtgttgtacatttgtagccatctactatccagtggattgagcgggagaaacaacgtaggcatcctcatcttgacctgttcggcgatgaacgccgtaagtgtgagaaggagcgtatggatgcggaaaggcttttccatactttccgtttacagccaaaaaaacagccatcggcaaaaaagatgccaaaacaaggcataaaagcacctccaacatggcggataaacatccacgcatccccgtaaagacctcacacagacccgggtctgcacctctcctgcacccgggtctccatgatgggtacacccgggtctcaagcggctttgcaagctgtttttgacaaaagaaaagcctgtcttgatgaaaaaagaagccgttttaacaggtttcgcacctgttcccgaacggtccctgtttttatcgtacaattgacacacaagaagttatcgttttttaccatgatggttatgacagatgaatgatagttcaaaatggcaactatcatgccataacatattggtttaaaccaatatacgaacggatatgatagtatgatggttggttttgcaaaacatttatatgaaatggctgctgccgttcttattgctgaattgtgatgtggatgtctgcaagattgattaaacagaaaaagcacacttgtcatacaaacagagtgccggaaaggaggtttcactccatccttcccggcacttttttaatataatatattcaggtaaacttcctttggtcgctttctgatcaagccaaaaggaatccgcccccactattatttcaccaattttaattcctcaatcaaccgcgggcatttcccccacttgtcgatcatgtagagcacatagcggatgtccacgctgatcgtgcgctgcaaatccggttcgaaggcgatgtcgccgctcatcgcttcccagttgccgtcgaaggcgaggccgatcaggcgggcgttcttgtcgaacaccgggctgccggagttaccgcctgtgatgtcgttgttcgagaggaagcaaagctgcaattcgccgtccttgttggcatactggccgaagtccttgctacggatcaagttgaggatttcgggttgcacccagaactcgtcgctttcggggttttccttttcgaagatccccttctgggtcgtatagtaatcataccaggcagcatcgtacggacggtagccgccaatggaaccgtagctcacacgcatcgtaaagttggcgtccgaagcgaaagccttctccgggtgcatctctttcaggccggcaaaatagaggcgttcgcccttagcgatatcgtaataagaatcacccgtgagctgttgcaattcgaaaagggagatgaggacagacaggctcaactcggcagccgggtccttcttcagcttcgcatatttcttcgggtccttcagcatggaggcgatattgtcgtaagacaggatggatgtcttcttgaatacatcggcggcatacttttcataatcgcctttatactttttgtccaccttcttgtagatatccggaagattctctgccggaacccgttcctttacgatcttcatcatagccgccagcaccttccggtcaaggcttgcgtcataatccttgaagaaagacttgatattgtcttcgaggaaaatatcgatttcttcaggggtagaacctttcacatccacgctctggatcatgcgcgccagcttcacgatctcggcgccgctcaggaacgcttcacccaggtaggtggagatcttcttatattcactggaagaagtatatcctttttccaacaggttcaggacgtcgccgtacacctctttacgctttgcatcctgtgccacccaggcggcaaaagcggcttcctcttcgcgtttacggtcgatcactttcaggttggccagccccttgttcatgccgatcgagtttttccagtagttggagctgccggcatatttggaagcatatttgatgcgcacctcgtcgctcttcaacattgcgtctttccaaatcgcctgcttgatgccacgcacttcgatgcgaggcttgttgctatcctcgatacgctgctgcacaccccatgaacagaggtagcggtccgtgctgccggggaaaccgatcgtcatcgcataatccttgtcctgataaccttgcaatgacacttcagccacgtatttaggctggtatggcttattatccttgctgtaggcagccggcttgttgtcggctccggcatatacgcggaacacggagaagtcgcccgtatggcgcggccacatccagttgtccgtatcgccgccgaattttccgaccgaactgggcggagcgaataccatgcggacatcattgaagacatcatagacgatcaggaaatacttattattattgtagaaaggcacgacatcggctgcctggaactccgtgtttcctacagaatcggccatcgcctgcccgatcgagtcggctgcggccagacgcaggtgctcttccttgatcgaagctatctgtgaattaatgcgatcgctcacatccaccgtctcacgcaggtagcgaaccgtcaggcccggaaccggcaactcttcttccttactctgggaaacaaaaccgtctttcaggtagtcgtgttccacactgcttaactgctggatcgaaccgaaaccacaatggtggttggtgaaaatcagtccttcattagagacggtgataccgctacatcctcctccgaagatcaccacggcattggctacacacgggtcagtttcactgtacaattgttcgtaagacggagtaaatcccaactccttcatcctctccaggttttgtttattcaactctttcagtacccacatgccctcatcggcaaacacttggcctgaagcaacgagaagcagtaacactgcccacaacttcttcatacgattcattctttgttcgttattcaataattaatttgattttcttttgttctacacgcgcggcaagccatttcttgatcttttcctgttccgcctcacgtactttttctttgcttttcaggtagactaacaggacggtatcgggtttaatgctatccatatccatcagataggtatgcgcacaagagacttccttgatataagggaaaaggactttcatttccggcatcagctcggacgtaagatgattgtaactgtgatatttgttcaggtcgcgtttcagcgaatcgatctggagggactgcgcccgaagaacctcttcgctattcttatacaagtcctgcatcagcagacttttcaactcgttaatgtcggtggcttcctgcccgaaaccctgctgcacgacaaggcccacgtttttcaagccgtatttcggcatcttggcacgggcgttcgcaatcatcgtctccggcacggtctcgccgatcaggactactttcacctctttcttgtcgctggtatcggtcaccgtcttgctcaatatctgcgtgttcgggaaactcaactcatccgcgacaaacgtccgcacccggtcattgaagtaactggcccggatcaggttgtagctcaggaaaaggctcggcacgatggtaaagaaaacgatcaccccgacatatctcgtcacgatcttctcgcgctgtttgtttaaaaagaccttcttcgggtatttcagcaggcggaccaccacgtaggtagccagactgataaacaccgtattgataaaatagagatagaaagcaccgaagaaataatacaggttaccgctcgccaatccgaatccggccgtacaaagcggcggcatcaaagccgtagcgatcgccacgccgggaatcacattccccttgctcttggtcgagctcgccacgatccccgccaggccgccgaaggaggcaatcaagacgtcataaacggtaggctgcgtacgggccagcaactcgctctgcgcctcgctgatcggggaaatcaggaaaaagagcgtcgaagtgatgacgctgaataccgtcgccgtggcaaaattacggaaggaacgcttgatcaggtcgaaatcggagattcccagtcccaagccgaatcccatgataggccccatcagtggggagatcaacatcgcaccgataatcaccgccgtcgagttcgtattcaaacccagcgaggcgacaaaggtcgcaaagatcagaacccaaaggttcgtccctttaaactctatgcctttccggatagactcgatcgtttcgagttcatcctctttttcctgacggacatcgaaattacggacaaagaagtccctaatctgcttgtgcaacaatcctttttccatcctattaaaatcaacgtttgtatacgaacatcccgtaaaacggcctttataatggctaacactctctcacaaccgttttaacacatcgcctaaaccgcacaaagatagaaatagtatctcgaaataaaaaataagagctgtgaacataaaataagcgaagtatatatcctgataattattgattttcacgtaactttgcaaacgcacaacacagaaacgacaacgaacactctcaataaatcccggtaaacaagatgaaatactacattctcttgatatacttactcgctttttccctcgctacggagggaaatacagcagtaaaagattcactgtcggaagccttgccgtcagcctcttctcctctgcaaaaactggaaatcatgactaatctgatggatctttcccgacaggaagaacaggtggaatatgccaaacagctctattggctcgcacttgaagaagacgaagactattataaggaagcggccctgaccgaaatcttgcgcttttacgtgaataccgatgccaaagacagcgcaaaggtgtatctcgccgaagccgaaagggagctgaaagggaaagcacgcgatttcctcgtcacgtatatgaaaacgatcatggatgtccgtgttgtctattacaccaaaggcgaagaccggatgaaactgattgaaaaatacaaactccgcctcgaaacggaaaaagacatgccggttcttgacaaaatatcgaactattatctcctcggtatggcgaacagcaaccgggtcgatccgaaaaaccaggatgctatctataaagaggtatgttattacatgaacaacctgatcgaactgtcggacaacatcccgctccgctattcgtatctgttccgcctgaatacgctcaacatactaagccttatggaagcgactcccgaaaatcgggtgaaagtctccctccgctacttgaacatgcaaaaggaatatgctgacacaaaagagatgaagaagcgcccgtacacaagcaaacggcatctgctgaacgcctactctactttggctaccgcagcagaaacagtcgggaaagatatggcaacctactatttcaactacttcatcgacttgaacaggaaatatcctgaagatgctgcattctccgctgaatatgaccgttatttcacttcgctcaactattataagtcaatacgggatttccagaaagccgcagattacaacgattcggtcatctattatttccgccacggcgatttccagttcgacctgaccgaaaacatcgtcctgacactaaaagacaaaatcgactgtctcgacagtctgcacagatacaaagatgcctatgaagcctacaaggaatattccgtactcctggattccgcacgcacacgaagcatggaaaacaaagtcgaagacctggagatcaaaaagtatgtggacgagctggtggtcgagaaaaaggcactggaaatagacctgcaaaagagccggagccagttatatctattcctcgcgttgctcattctttcgatctgcttcggaatcttcatattcttccgcctaggaaagatcaaatcgctatacaaggaattgcaggaatcgaaccggctggtcattatcgccagtgaaaaggcacaggaaagcgaacggatgaagaacgcctttatcaagaatatgtgccacgaagtgcgcacgccgctaaatgcgatcaatggctttgccgaactgatcaccagcgacggtataagcccggaagagaaaaaagaattcagcaagatcatctatacgaactgccacaacatcacctccatgatgaacgatgtgctggtaatcgcccaactggacagcagcaacgaggtcctcccactggaaccggtccacatcagtctgctctgtcaccacgagatgaacaaattgaaaaagttacagcagaagccggatatccattaccaggtcgaaggtgacaaaagcaacgacctgatctattcggacccgaatcatttcggcattatcatctcccatctgctgaacaacgcgaacaagttcacgaatcagggaagcatcacgctctcctaccagcccgaggaagaaggaaggataatgtgtatctgcgttaccgacacaggatgcggaattccggcagacaagagcgaatggattttcgaacgtttcaccaagaacgacgactttatccccggttcgggcctcggcctctacctctgccgcctcatcacccaacgcctcaacggttccctcaaactggatacctgttacaccgggggagcccggttcattttacggcttccgattaatccctacaaatagccaacaggttttcttttggcagacgtgccccataaatcatcatttaattagttcagtttttcttagatgcaaaccttttcccgatataaggcaattcgcttaacggaagatcgcgtctaatgatgattgccaggaaaatcaggagtagaaccgtgcgatagcccaagcgaaggatttccgaatcgatccggggcaacatcccagctgcatagaataaaaccgccaatatgccgtaaataacggctgatcttatatcgtattgaatcgggaacttcttctgcccgatcgcataagaaagaatcatcatcaacaggttgctggcaaacgaagcccaggcacacgccatataaccgtaaaccggcgccagcaacacgatcatcaacacggtcaccacgcagccgatcgtcgagaagtaggctccccattgcgtctggtcgatcaacttataccagaacgacaggttaaaatagatcccgaagaacagttcgcccagcatcacgatcggcacgacacgcaatcccggataatacttggcgtccacaaaatatttcagaatatccagataatacatcacgcccaagaagataatcaacgaaaagataatgaaatacttcattgcctccgaatatgctttcgtattatcgtcatccttattcttggcaaaaataaaaggttcgtaggcataccggaatgcctggataaacatcaccatcaccaccgccaccttgaagcaggctccataaatccccaactgggtagctgcataatccttatcttcgaacaggaaagggaacagaatcttatccgccgtctgattgaaaatcccggcaatccctaagaccaagatcgggaacgagtatctcaacatctgtttcaacaacacgaaactggctttctcgcgcaacccgggtatcatatccggcaccaaaagcaagaatgtcaccaccgaagtaaccacattgctgacaaagatatactccacctgatagccgggcacataaaaccagcctatcaacctcggcgcacattcatacagccacgggcaagcgatcaggaagaatattaccaatacgatattcaggaatatattcagcagcttgatcgccgcaaagcgaaccgccttcccctgataccggaggaaagcaaacggaatacaacagaaggcatccaccgccacaatccccgccatcatcccgatatattcaggatgtgcaccatatcccagaaagttactgaccggcgtcagcgcactgaacacaaacaccataaacaggacggaagtgaatgccagactgaacaacgtcgtcgcatatacccgcatcgggagcttgatctccttcttgttcataaaccggaaaaagccggtctccatcccatacgtcaatatcaccatcaacaaggctgtccaggcatacagattcgtcacaatcccgaaatcgctctcggtagccaatacacgcgtgtacatcggaaccagcatccagttcaggaatttcccgacaatgctgctgacaccataaattgcggtctctcctgcgagacgcttcattcctcctgccataacttaaaaacaattgacaattgataattgacaattaaaataacgaactttgtattccatcggggcgaagccgtcccaaatgggtataagccaactccgtcacctcgcggccgcggggcgtacgtttgataaagccttctttgataaggaaaggctcgtaaacctcttccagcgttccgggatcttctcccagggcagtcgcgatagtcgtcaatcctaccggtccgccgttaaacttgtcgatgatagtcgtcagcaacttattgtcgatctgatccaggccgtaacggtcgatgttcaatgcctccagagcatagcaggaaatcgccttatcgatctctccggatcctttcacctgtgcaaaatcacgcacacgacgcagcaacgcgttcgctatacggggtgtaccacgactacgggaagctatctcgcgtgcagcactcaactcgcatttcacattcaggatatcggcactacgcaacacgatcttcgtcagcgtctccatctcgtaatattcgaggtgcatattgatcccgaaacgcgccctgagcggacttgtcagcaaaccgctgcgagtcgtcgcccccaccagcgtaaacggagccaggtcgatctggatggaacgggcgctcggccctttatcgatcatgatatcgatccggtaatcttccatcgccgaatacagatattcctccacaatcggactcaaccggtggatctcgtcgataaaaaggacatcgttcttctccagcgaagtcagcactcccgcaagatcgcccggtttatccaacaccggcccggaagtcaccttgaagccgactcccaattcattcgctataatgttggataatgtagtctttcccaatccgggaggtccatgcaacaacacatggtcgagcgcctccttacgcatccgggccgccatcacgaaaatcttcagattctcgaccactttggcctgtccgctgaagtcatgaaacgaaagcggacgaagcgcattctcatactcccgttcgctctccggaacccgtgcatcccttatatcaaattcatcttccatactcttattactttgactggcaaagataataagaattaccgggttctgaacttgtgtcaccggaatatcgggacaaagatagaaacttgcagatcacgtgtccgtcccgatttcatataagggactcctttcattacattgcaagtaccctgtttgtatgtcagggccagatcgaagtatttgaaagcataggcggctttgacgacgaccggcacgtcaaaggcagatttgattgtcttcccaatcataatattatccttaaaatggagagtaggctcaactcctactcctaccttcagcctcccgatcagattataattcaaaactccgttcaaagccatgtaattccttgcaaacttacttttgtaacctttaacgggagtcgctttattgccaaccgaggcaatttctccccgcttctgcccatataataaggctgcatccaccgataaacggtgtttcaattcgaactgcaactgatatcccacatgaaaagaaggcttcatatccggtatattaaacccgactttgcctttagacatcgcctcatccttataccaatccatcgaaacaccacctattaccccacttttcactttcccattttgtgcggaaacagataaacacactaaactcaacaataaaaacatcacactctttttcatatcaactctcttttattggtttgactttgttgacatgaccgggaaaatgagaaaaacccctatcaaatattactaaaaatatttcctttcaaaccctgtctttgaaatctaaaaaaatcatttcatagcatatcgtaaagcaaacgattgtgcaaggccaagcttttaatgcgtatggtccgataatatgatgccgaatgccgggaggaactaattcggtagaacataaagcaacaaaaatcaaggtcgtaaaaaagagataacgattatatcttttatggacagaagggctgcaaatataccaaatagcgacaccaatcatcaacgtgatataaccacttgcttcacttcctgtactaaacaacacgacatacaacaatacattagctaatagcatgagccgaaaacggagatatttatattgctgaattctgaaataagggataaagaataggatcagtcccggtataatcagccacaaatcactatataaagaacagcctgtgagcttacgtacgattcctaataaagaaatattttgagatatggcgaacatattgaggccatttttgatttccaaccgttccaaccacgcaatatattgcgaagaaatataatctgtccccggagagaagaatatcggcaaaaccaaaaacaaacatccccaaaaaacgcaggaaaatacaagacgcaatttgtgttttgaaaaaaagaaaaaagctaatcctacaatcggatatatttttattaatgttcccaataaaatcaagcaagaagcccaaaattctttttctttctcaattaaaacaaaagagagaataataaatgctgccacagagatattaaattgttgtaccccctgcgccgtcattaactcacacaaagaataccaataaactataatcctctgactctcattgaaaggtaactgacgaatagcataaaaaagaaaatatgtattcattaaaatccaaaaaatcatccccaaccattcaggcaagatagaaaatggagcaatcacaagcgcaaagatcggaccataatggtttacatcataatattcggtaggatactccacatataaatgtaatccgttaattacgtgaggaaaaacattttcaaatatcttatagttattatatttacctatcagcaatttgactattgcataaattagtccagaggacatccatatccaaaagaccgttctttctctatgaaaaacagtcttttgaaatatatgtgataaaaagttgatctcttttacagctttcatgtcaaaaccaatatcgcttaagcgaaaaacttcaacagcaagtctttgttgttgtcttcaacctatgcttgaataggttgctcagggataatagacttaggagcagtatcccactaccctttcagatatattcgtttcttggcaaagcaaggaaacgaaaatgtcgctattaacagtaaacatccaatttttctaaatgtcttcatattatgtttaatattttcaaatgtaaacatagagggaattattggatgcaacaaatcggtatatggacaaccttctttttatatggacaaaattatttctcagctgctataaaactgataataaaatacataaacttacttcatatagcttacgcaaacgatctaaatccttccaaaatccttttttaatgctctttacctgtatattccacacttccgaagacaaaactgtccctatttttatacccatatctactctattaccatcctttttgtaggatacacccatttatatcgcttcctttttgattcggacacagcttccgccgagtacgacttcggaacttattggccgaatcggaactgactcccaaaagaacagcctcctcgtttaagtgcaaatccaagaaactgagataacagatcttggtttctgtttttgtcagacccaacgtattttctttcataaaaacgctgacattcggaaaaagggaatcaatcagacgaatcaggcttctccattcctcttcgtttagtttttgttcgatatcaggttttactttccgacagcgctctttcattgtttcaaataaagaggattgcttcaatttttccacccttaatacggtgatttctttcttatattcacttgtatcctcatgcgcagcagctttcctttccatctctgccgttaactcccgaaggcgaccttcctgttccgtttcttgcttctcatgccgatttttttcctcttctaaaaactgttgctgccgatttatttcaagccgtcttttcctatccctcaactgataacccacaatcaacaaaaggcaaatgataacagccaaagcaaacaaaaactgtttctctgcaacaagttttttattgtcttgaacgacagtgaccacatcatgccgtttctctgcatcaataatatctacctgtttttgttgatcatataaagaatctttctttgcctgatattgttccaaaagagaaagcgctttttctgtatcaccagcttctttttcgataaggtaacctaaatagaagcaatcgatcgatgtataagggttcaatgacggacctgtggctaatgctaaataatagcgggctgaatcaaggaggctttcattataatagagatcactcaaagccagataagagggaacttgatccatcgtatcagaacttaaacttctactataataggctctcgctttttccacatcgcccattaagtcataaatatttcccaaaccattagaaatcgaactaatcccccttaaatcttgaaaccttgtaataacagaatccgctattaacatatagtgaagcgccaacgacaaagaatcgtcaaatgcccatgttttagccacatctcgcagggcaaaggcataactccgctcgttaccggcctgcttaaaaaattctgccgcttcttcaaacttcctccgctcttcgcttctttggcccgtataagtgtacaagtctgccatatagctacagatataccctgctacatcatataaatacttctcttttgccaacgacaacgcatcagaataagccttcattgccgggataaaaagcttatctttcacatacgaacgccctaaataaagccccatccaagcctgttgttccgcggccccatgacttttataccaaaccaacgcccggtcgagttgttcggtatatagcatatctttgaagagtttatccgccgcccggcaatacagcatgcaccaacgtgcaaactgccgctcgttcaacctatcgggagtttttacctcattcaataagatataagcgctatccggatttgcttctaaaagtatttctgcccggtccatcgtttccgatgcgatccggtctcctacacacgaaaagaagagactgacgggcaacaagataagcaagaatatttttttcatacggatatattgttagacaggttgttttcaggagggaaaggtacgcatttttataatcaggacaacccttttaactactcgatttatcataaaaacaggttcgttgctgtcaatttgatttgtttttaagatttctgacgatattaacattcctgttttcaggcttcttagcttaaagagcaaccgtttttgaaactctttttccaaatcatccgaatgattttcccgaacaatgcgaaacatcacccataagcccatcacactctttccagggccgggtgaagagaacctgaagaaatatctgaaaggtctgaatgtacatccgttcgtcatatgcaagttgatgcgtggtcatacaggcagggactatatgtcaccacagcaaaaagcatcctcaagcatgtagatgaactggcctttgagatcagaaatattcaacagggcaagcattaccttgctatgcaataaacttattagctttaacacatggcctaccccgaaagtgacgaaaaactaatgtttttgcaaaaacaaccatcatactatcatatccgtttgtatattgttttaaaccaatatgttatggcatgatagttgccattttgaactatcattcatctatcataaccatcatggtgaaagacgataacgtgctgtgtatcaattatacgataaaaacagggaccgttcgggaacaggtgcgaaacctgttaaaacagcttcttttttcatcaagacaggcttttcttttgtcaaaaacggcttggataaccgcttgagacccgggtgtacccatcatagagacccgggtgcgggagaggtgcagacccgggtctgcgcgaagccgttccgggaatgcagagaagtttatccgctataccaggggcacttttatgcccagtttttgcatcttatccagcgaaaagaggcattttttaggcaaaaacgcccccgttttgtcaatggctattctgcttatataaacataaacagtgcattatcatccatataaataaacattcaagtaaaaagcatgatggtaggatggaaccttccggcacgattactctgaattttttattttcacaaccatatatttgaaaaaaatttacatacttttgtgaagccatttcaatattataatattctatagccatgaatacaaaatttttactgtcttccgataataacaaccgcaatgaacttctgaaaaagaagatcatccattactatattgccaatggcgatgcgaccattgccgatctgggccgtgaaatggacctgagtattccgaccgtcaccaaactggtcgccgagcttcaggacgacggctatatcctggacttcggaaagcaggaaaccaacggaggacgcaaaccgaacatctatggcctcaatccggcatccggatatttcgtgggagtcgatatgctgaaagacaagttgaatattgcagcgatcgacttcaaaggcgacaaagtacaactcgaagaaaatatcccataccaacttgaaaatacaccagcctcgctggagcaattctgcaagattattgacgatttcatcgtttcattgcctgtcgaacagaataagatattagcgattggagtcaatatcaccggccgcgtgaacccagcatcgggctatagttacagcattttctatttcgaagagaaacccctcgctcagattcttgaagaacggttgcagacgaaagttttcattgaaaacgacagccgggccatgacctacggcgaatatatgaaaggagtcgtacagggagaaaagaacattctgttcgtcaatatggcgtggggactaggtctaggtatcatcatcgacggcaatttatactacgggaaatccggcttctccggggagtttggacatttttgcatgttcgaaaacgaagtgctatgccattgcggcaagaaaggctgtctcgaaacagaggcttccggatcggctttccaccgtatcctgatagaacgttaccgggaaggcagcaacaccatactcgccgggaaactggacagcggagaggaaatctcgctcggcgacctgctcgaagcagtgcggaaagaggatgtactttgcatcgacatcctcgaaaaaatgggcgtaaatttaggaaaaggtattgccggactgatgaatattttcaatccggaactggtcatactgggcggaacactttcactggcaggcgagtatatcagtttgccgatcaagagcgccatccgtaaatattcgcttaacttagtcaatcaggacacagaaatcaaaatatccaaattaggagaaagagcaggcgcattcggagcatgcctcttatcaagaagtaagctactcggtatgatacattattaataaaacattcttttctttaggccattatctataataatattttaatcaaggctatattattaaaatattttatttatatttgccgggtatttaaaaaaataccagacaataaaacacattaaatcgctcagataatggaaaagattaaaggcttaattgatgcacctttcacaccgttctacgaaaacggagaagtaaattacgaaccgatagaagcatatgccaagcttctggtcaaaaacggtttaaagggagtgtttatcaacggatcttcgggagagggctatatgctgaccgacgaagagcgcatgaaactggctgaaagatgggtagaagtggcgccttccggattcaaggtcatcgtacacgtaggcagcacctgcgtaaaagcaagccataagctggctgcgcatgcccaaaagatcggagcctggggaatcggagccatggcctctcctttcccgaaagtgaatcggatagaagaactggtgaaatactgcgaagaaatcgcttccggagcacctgaacttcctttctattactatcacatcccggctttcaacggcgctttcctaccgatggtcgaactgctgaaagcggtagacgggcgtatcccgaacttcgccggtatcaaatatacatatgaaagcctttacgaatacaaccaatgccgcttatataaagacggcaaattcgatatgcttcacggacaggacgaaacaatccttccatgcctggcaatgggcggtgcacaaggcggcatcggcgggacaaccaactacaacggcaaagaactgaccgggatactcgaagcctgggctgccggagacctcgaaacagcacgcgaacgccagaacttctcacaggaagtgatcaacgtgatctgtcgttatcgcggcaatatcgtgggtggcaagcggatcatgaagctgatcggactcgatttaggtaaaaaccggacaccgttccagaatatgacagatgcggaagagaccgctatgaaagccgaactggaagcgattcattttttcgacagatgcaataaattctaaatccataaacgccatgaacgacacaacaaaaccgtccgaatacctcggatattggggagaaaaatacaaaaatgatttactgaccgacattctgcctttctggctgaaatacggtatcgatcatgagaacggaggctacttcacttgtttggaccgggacggttcgctgctggacacaaacaagtcggtctggttccagggacggttcgcctttattctcgcttatgcttacaacaacctcgaaaaacaggccgaatggctggaagcctgtaaaaacgggatcgactttatcgagaaatattgtttcgatacagacggccgcatgttttacgaggtgacgaaaacaggaactcccgtacgaaaacgccgatatgtattttccgaaacgtttgccgcaatcgccatggctcaatattcgatcgcttcgggtaacaagagctatgctgaaaaagcagtcaagctgttcaaacagattctctattacaaaaacacaccgggcgcattagagcccaaattcagagaaggattcgttgcaaaagggcattccttttgcatgatcctgatcgatactgccgcccgcatccgggaggcagtagatgatcctgtcctgacacgtcagatcgacgagtcgatagccgaactacgtcgtgatttcatgaagccggagtttaaggccatcctcgaaacggtcgggccgaacggcgaatttatcgattcgattcccggccggaccatcaatccgggccattccatcgaaacggcatggttcatcctcgaagaggccaagcaccggaactgggacccgcagctgaagcagatagggctcacgatcctgaactggtcctgggaatggggttgggacaaaacacacggtggaatcacctattttagggattgcaagaaccgtccgcagcaggaatactggcacgacatgaagttctggtggccgcagtgcgaagccatcatcgccacgttgtatgcctatgaagccacaggcgatcccaaatacctggaaatgcacaagcagataaacgaatacacgtatgcccgttttccagacaaggaatacggcgaatggttcggctatttccattacgacgggacgctctcgcagccggcaaagggaaacatgtacaaaggtccgttccatattccccggatgcttttgaaatgtcatcttttatgtaaggaaattcagggctatgacaaacaataagaaatactatccctggatcgttgtcgctctgctttggggcgtggctttgttaaactacatggacagacagatgctttcaaccatgaagtctgccatgatgatcgatattaccgaactggaatcagccacgaacttcggacgcctgatggcggtattcttgtggatatacggcctgatgagcccggtcgccggcatgatcgccgaccggatcaaccggaaatggctgatcgtcggcagtctcttcgtctggtcgttcgtcacgctgatgatgggatattcgactgatttcaaccaaatttatattctccgcgccattatgggagtcagcgaagccttgtacatccctgccggactttcgctgatcacggactatcatcaggaaaaaacgcgatcattagctgtcggaatccacatgaccgggctctacaccggacaggcattgggtggcttcggagcaacgatcgcaggagcatacagctgggaaacgactttccactggttcgggattatcggaatcgcgtatagtctggtattgattcttttcctgaaagagaaaaaagatcatacggtcgccaagcttgactcggaacccggcccgaaagagagtccggtaaaagcggctataaaaggaatggggatgttgttcgtcaacatttcattctggatcatcctgctctatttcgccacttcgagtttgccgggttgggctactaaaaactggctgccgactttgttttcggagaatttgtccatcgatatgtcggaagccgggccattgtccaccttcacgatcgcgatctcttccttcatcggagtgattgcgggcggtatcttgtccgacaaatggattcagcggaatgtacggggacgcatttataccggttccatcgggcttgccttgaccattccggcactcctgctgttaggattcggcgacagtttcgccatgattgtcggcggtggactctgtttcggtatcggtttcggtattttcgacgccaacaacatgccgatcctctgccagttcgtatcgccacgctaccgggcgaccgcctacggcattatgaacatgaccggggtatttgccggagcgatcatcacaaaactgttgggcgagtcgacggatgccggtaacttagggcatgatttcgcaatgatggccagcttggtattcgtagccttagtagtggaagtcatcttcttacgtccgagaacggtcaacatgaccgacaagtaaaacctgtaaggtttccaaaggtattgacttttcctgcaaatgtcattatctttggaaatcctattttataataacccaatcaacaaaaaacatcatgagaaaaatctttctttacttcagcctccttctcttcatgcaaacagcctttgccgccgacagcttgtttgtcagaaagccgcagatcccgatactgattgaccggacagacaatatcctggtggaaatgcgtgtacaggcacacaaaggggatgtactcaacaagctttccctgcaattcaaagaaggaatcgacttaaacgacataaaggctctacgctttttctatagcggaacggaagcgacctcccggcagggaaagcattaccgtccggtttcctacatttccagccacgcagaaggcaagacaaaggctgctaatcccgcctactccatcaagcagagcgaagtaactgatatcaccaatgtcgtgaccttcaccagtaaccagccgatggtggaaggagtcaactactattggatcagtatcgagatgaaaccggaggcttccctgttaacgacctttactgtccagatgccgatggctgaaatcaataatatgccggcgacaattgtctgggacggcaaatcagatgtccgccgcatgggaatcggtgtccgccacgccggtgacgacggggcttcggcctaccgtattccggggctggtaacgaccaacaacgggacgcttctgggcgtgtacgatatccgctacaacagcagtgtggacctgcaggaaatggtcgatataggggtaagccgcagcaccgacaaaggacagacctgggaaccgatgcgtgttgcgatgacgttcggcgaaacgggcggcctgcctcacgcacagaacggtgtgggagacccgtctatcctggtggatgaaaagacaaatacgatctggatcgttgctgcctggacacatggcatggggaacggacgcgcctggtggaattccatgccgggtatgtcggccgacagcaccgcccagctgatgctcgtcaaaagcgaagacgacggcaagacctggagccagccgatcaacatcactccgcaggtgaaagatccttcctggtacttcctgttgcaaggaccaggccggggtatcacgatgaaagacgggacgttggttttcccgatccagttcatcgactccacccgtataccgaacgccggtatcatgtacagcaaagatcggggaaccacctggcatctgcataatctggcacgtacgaacacgaccgaggcgcaggtagccgaggtcgaaccgggtgtcctgatgctgaacatgcgtgacaaccggggaggcagccgcgccgtggccaccacccgcgatttgggcaagacctggtatgaacatccgtccagccgcagtgccctgcaggaaccggtttgtatggcaagcctcatccacgtggacgctaaagacaacatcacggggaaagacctgctgatcttctccaacccgaacacgacgaagggacgtaaccatattaccataaaagtaagtaccgacggaggcatgacctggccgctttccaaccaagtgacactggacgaagacgaaagctggggttattcttgcctgtccatgatcgacaaggagacagtcggcatcttctacgaatcgagcgtcgcccatatgacttttcaagctgtcaaactgaccgatctggtcaagtagtcctgcatgaaacgcatactcttcatattgataagtttatatatagggatattggctgcctgtgctgccaatatccctcatttgcttccatggccgcagaaagtggcatggaacgggaaaaagtttcaatataggggaacttttgtttcccttacggaaaacttttgttccataggcatggaacaaccggcaggcaataagataacgggcaatccgtcaagccatccggcactatcggtcaaatgggtggaggatttccccgatatccctctcaatcgcaacgaagcctataaactgcgtgtcacatcaaaaggagtggagatcgaagccatcaccgaaacgggcgtttacagggcaatccagacattacgccaattgacggaaaagaaaggcaacggcattgcaatcaccggatgcgagatcaccgactggcccgcctttcgcatccgcggcttcatgcaggatgtaggacgcacctatatctcgacggacgaattgaaacgggaaatagcgatcctggcacgttacaagataaacgtctttcactggcacctgacggaaaatcaggcatggcgcctgcaaagcaaggtgttcccaatgctgaacgacagcgtcaacacgacccgccagccggggaaatactacacgctggaagaggcacgggaattggccgctttctgcaagcaacatcgtgtcctgctgatcccggagatcgacatgccgggacacagtgccgctttcgtccgtactttccgccatgacatgcaaagcccggaaggaatgaagatactgaaactcctgatcgacgaggtttgcgaaacgttcgatgtcccttacctgcatatcgggacagacgaggtgcagttcaccaatccggatttcgtacccgaaatggtcgcttatgtccgctccaaggggaaaaaggtgatctcctggaatccgggatggcactacaagccgggagagatcgacatgacgcatctgtggagctaccgaggaaaagcccagaaagggattccggcgatcgactcccgtttccactatctgaaccatttcgacacgtttgccgacctcttcgccctctacaacagccgcatctacaacgagctgcagggcagcgatgatctggcaggcacgatcctggcaatctggaacgaccggatgatccagccggaagccgatatcgtcaaacagaataatttctacccgaatatgctcgccatggccgaacgtgcgtggagagggggtggaactgaatatttcgacaagcaaggaacggttttaccatcggaagacagcgagtcgttcaagtctttcgctgatttcgagaaccgcctgctctggcataaggaacattgtttcgggggatatccgttcgcttacgtcaaacaaacgaacgtcaagtggcgtattacggacgcattcccgaaccaaggcgacctgacggcatcattcccgcccgaaaaggagttgaaatcccactatacatacgaaaacaagacgtatgagacacaggatgcgaccggcgcaggcatctacctccgccatgtctgggggacgcttgttccagggatctacaaagagccgcaagagaaccacacggcgtatgcctggacctgggtctactcgcctaaagcacaggatgtaggcgcctggatagagtttcagaactacagccgttcggaaatggacttgccgccacttccgggaaaatgggattaccgggaaagccgagtgtgggtcaacgaccgggaaatcctgcctccggtatggacggcaacgcaccggaccaaatccaacgaggtgctgctcggcaacgagaattgtgtcgtgcgtcctcccatgcctgtccatctgcagaaaggatggaacaaggtattcatgaaacttccggtcggaaagttcaccgcgccggaaatccgcttgccgaagtggatgttcacattcgtatttgtcacaccggatggtgaaaaggctgtggacggcctagtctattcacccgataagaaacgataagcaaatgaaaaatatcctgctctgtttattcatcgtatttagtgccacgatccaggcgcaaaagatcaaggtggcctgtgtaggcaacagcgtaacgtatggtcacggaattgagaaccgcgaaaagaacagttatcccgcccagctccaacggatgttgggcaacgaatacgaagtcgccaatttcggaaaaagcggggcgacgctattgcgaaagggacaccgtccttacaacgagcaggaggaatgcaaggccgccctcgactttgccgccgaccgggtcgtcatccacctcggactgaacgacaccgatccgcgcgactggccgaattatcgggatgacttcacgaaggattatctgaccctgatcgatgctttccgacaagcgaacccgaagtgtgaaatctggatctgccgcctgacgccgatctcccaccgccatacgcgcttcaaatcgggcacacgcgactggtactggcagatacaacaaaacattgaagatatcgcagtactcgcccacaccggactgattgacctgcatacagaactttatgaccgccctgacctcttgcccgacgccttgcatcccacagccgaaggagccggaatcatcgcacggacggtctaccgggcattgaccggaaattacgatggtctccaaatgcccgtgatctattcggacaatatggtactccaacgggagaaaccgctccggatagccggaacagccaatgccggagaaaaagtgacggtcagcatcgccggacagaaaggcgaagcgataacggcctcggacgggaaatggtcggtcatcctgccaccgatgaaggcaggaggcccgtacacgttgagtatctccgccgaatcagggaaactggattatacgaatatcctgatcggcgaagtatggctttgctccggacagtcgaatatggcatttcaggtgagcagtaccgttgacagccaacgaaaggcttttctggaatttgccgcaaggaaaccgcaaatccgtcttttcgatatgaaaccacgttggctgacaaatgcggtggaatgggacatttcgacactggactccctcaacaggctccaatattaccgggatactgaatggaaggaatgcaacgaggaaacaacgaaccgtttctccgccgtagcctttgccttcggacagatgttgtcagacagcttgcaggtcccggtcggacttatcctgaacgccataggcggttcaccggcggaagcctggatagaccgcaagacgctggaattcgaattccccgacatcctctacgactggaagcagaatgattttatccaggactgggcgcgggaacgcgccgccctcaatatccgtaaatcgacgaacaaacagcaacggcatccctacgagccttgttacttgtacgaatccggtatccagccgctcaaaaagttcccgatacggggtatcatctggtatcagggagaatcgaacgctcacaatatggaagcacatgagaagttgttccatcttttgacaaaaaactggcgggagaactgggcggaagaattgcctttctattatgtgcaactatccagcatcgaccgtcccagctggccttggttccgggacagccagcgccggatgctccaatcgatccccaacagcggcatggcggtcagcagcgaccatggcgactccctggatgtccacccgcgccacaaacgggagataggggaacgcctcgctcactgggcactcaacaagacatacgggcacgagatccttccttccggcccactctaccgatcggtgatattcaaggacagcactgcctatgtcacattcgattacggaaaaggcatgcacagttccgacggcgacaaactgcgtactttcgagatagccgaacacgatggtttattcgtccccgcagaggcacaaatcatcgatggaaagacagtaaaagtatggagcggccaaatccggaatccgaaattcgtccgttacggctggcaacctttcacccgtgccaatttagtgaacgaagcggggctgccggcttcgacattccgttcggaagcggctccggtcagctggtttcggctgcccgacctacccggcactgaaaaaagcccgtcattaggcgtatctgctccgtttaccggtgtcagtggcgggcagttgttcgtggccggcggatgcaacttccccggcaaaccggcggccgaagggggaacaaaagaatactactgcaatatatatgcattagatataaccgcccgatctcatgccggatggaaaaggatcggcaaactgccaataccgcttgcttacggggcatcggtcacaacccccgaagggctcgtttggatcggaggaaataacaataaagaggtctcccgacaggtcttcttcgtcaactgggacggggaaaaacaacaattgcatatcaccgaactgccgccacttcccatgccgttggataatctctcggccacatacgccgatggttgcctgtatgtcgccgggggtaagggcaagccgcaaacggtcccaataggtcaggacggttcgcaaaccgcccctacgaacccactcttttcattacagctaacaccgtcgcttcaaaaggaatgggtccggcttccggatttccccggacctgcccgagtacagcctgtcctcacggcacagcaatccgaggatggcatacgactttatctggcaggcggtttccagccggcatccgcccatcaggaagccattgtttgcacagatatgctttcttatcattcgaagacaaaacagtggagaaatgaaggattcctgccttctttagcaggcggttcccaccgtaccgttacaggaggttgcgccatcgcatcaggcgacagctccatcctgctggtaggaggcgtgaactacgaccgtttccgcgacgccctaaaccaccccgagccggattatctgctacatcctgccgactggtataaattcaatacctccctgttacaatacaatactttcacaaaacactggacccacttaggcaactacgaagaactggcacgtgccggtgccggcatcgcaaacaatgccaacacggtaatcataattggcggagagttaaaaccgggcatccgcacgccagaggttaatgcgtttaaactgacgcgccatccctgattcataccaaagccaatttacgaatattcgcatcccaaaccggttccgaaaaaatcagttcgacagcttcggccggggtagaggcgaccgtccaaagtgctgcatgctgcgggcgcatgaaatgctcgtcgacggcccggcggaacatctccaaaagaggatcgaagtagccgtttatattcaggatgacaatcgggttgagatacaagcctaactgtttccaggtaatgacttccaacaattcttcgagagtgccgcatccgcccggaagagcgatcacggcatccgaaagatcagccattcgttgtttgcgctcatgcatactgtcgacttcgaccagatcggtaagccccttgtgacaccaatcctgttctaccataaaacgagggatcacaccggtcacagtcccgccggcagccagcgcagcatccgacacggcacacatcaggcccgaattgccagccccgttgatcactctcaggttccgttcgcccaacagatgtcccaactcggtcgcagcctcccgatatgccgaagcgacctgcgtgctggaggcacaatacacgcaaacggaagttatcttatttctttctctttccatctttctttttgcattatgattttaaaacaaaggggattcaacaagccatcaaccgaaatcatcagactcagcgccttccaaaaccacttattttcccttatttatatcatatccgaacaaggcgaaatcgcccaggcaaggatcatccgggaagatatgcgacagggcctcggttatctcaagcgccgttttcagggtggcggttcgctgctgtgtcaaaccaagttccagtgaaatttggtgaacatgcgtgtccagcggaataatcaattggcggggatgaaagacagtctgccaaatcccgaaatcgacgattccatcagtccggaccatccagcgaaggaacatagccaggcgtttacaggcagaagtgccgcccatcaccggaataccgtttatgccggaaaagagatcctgcaatttaaaaaccggattcgggtaagagcttgcagccaatgcatcttccaatgaatcataccgctgatatatctctttcaaccgatcacagagggcacagaggtccgaatgcgtataaaagcgataaaacgtatcgcgtttgccggctggaacatccgaaaccagttcccagtaccgcccggacaatacccattcgtaaggacttccacccatccggctatgtaaccagtccgccttgcggaggatcagttccctgcgtccataagagatccaggaagtgataaaagcggatatttcgatatcccgtttctccgtaaaccgatgaggaaactgaaccggatcatcggatataaaagacctcacattatagatcccggcccattccttcaatttcgctttcagttgttcgtccatcccttacttcatctttaagaaatactggcgccggtcttcgggataatgctcgatggcatagcgaagagccgtacgcggaagctgtgtcgcataacgttccagaaagtcggtaagggtatcccgatctcttttgcccacttcgcggagcatccagcctacggctttatgcatcaaatcatgtttatgcgtcatcaaccgttcggccaacgccagcgtatcggtaaaatccgaacggcggataaaagcccaagtacagacaatcgaaatccgctgttcccagaggttatcgctggcagccagttcatacaagacggaacggtcccggttcaccaaatattcgccgacaatatcccggcaggataaatccaccaaatcccaattattgcagcggcgggtattcttcagatagaaacgatatatcttttcccgttcagcttccggtgtcttcttatcctggaaacggtagaccagaaccaatagggcgcaaagacgggcctcatgccagagactatccaacaagcgctgcaattcatcgagaggcatcgctttgttagctttcgctatactgcgagtttgcggaacgacaacccctaaaaagcggtcgccttcgccatattgccccggtccggtcttgaaaaatcggctcagatgggccgccttttccggtgaaccgaccgattgcagttcactcagcacaaactccgccgtcatggacgcagtacccgtgacacaggacggtcgccttccaagaatccgattacattgttgcaaaccgtacgcgccatgataatacgcgtttccaatgtctgcgtcccaatatggggcgtaaggacgacattttccatttccagcaactccggcgagggataatcgccgaactcgaatacatccagaccggcgccatgaatcgtcccgtctttcaacgcctgcaccaaagccttttcatcgaccaaaggaccgcggccggtgttgatcagaacggccgtcggtttcatctgtttcaattcggcttcaccgatgatatggtaggtttccggtgtataaggagcattcagagagacgaaatcggattgggagaggagctcctccttggaaacgtatgtcacgttcagctttgtctcttcttcgacatacagttggcgacggttatgatagaggacttccataccacaggcattcgcacgtttggcaagggcctttccgatacgtcccataccgataatacccagcgtcttcccagtcacgttgatacctaaattctccaagacgccgactttcatgccaaggccttcccggcgcagcttacggtcgcattcggtaatgcggcgtgccacatcgagcatcaggccgagtgcgagattagcggtaggggccgtcacggggtcaggggtattggcaaccgtgattcctttctcaaggcagtaggcgacatcgatattattgtaaccgacagcatagtttgccaccattttcagtttggaggcatggtcgatcaattccttgtttaccgggaaatcgaacatcgagcacaacacgtcatactccggaatcatctctaaaacttcttcgtacgtgaaatctcttccttcgggaaaagtaacctcatacttgctttccagctcggtaaaaccttcgcggaacatgtcgtaagtaactaatatctttgtcataactattctttttaaatttgcaaaaatataaaattatccgatgttcacttcttttcatggtcacggataaaccggacggctaaagggaaagcggcggcgcacatactgccgtggtcgaaaccgcccaactcgtaaagggtcacatcaggatggccgagcagtttgaaaaggcggtagaaataggcggactcttcgtaacggccatacaattccttttcacggtcaccggaaaggatcagaataggggcgcaatcattccggacatggtacaagggagccgtttcgtcgattgtcggctgcaaaggtttcaaccctcgctggttgcgggtttcgaaatgagtgattacctggccgctgaaagggatgatcccggcgagcttgtcggcatctttcccataacgcgccaacagcttcttatccaatccgaccatatcgaccagatatccgcctgcagaatggccggcaatatagatggaggaggtgtcgcctccgtattttcctatattatcgaatacccaagcaacggcggcagcggcatcatcgacgatctccatcgtcttcacatgcggagacaaacggtattcgacacctacgactaccatgccgtccgttaataacccggaagggatttcacgactcccgccggtcaaaccgccgccatgaaaccaaaccacgaccggcgcattttgtacatccggctggtaagcaatatccagacgacacattttagaagcatattcatcacctgtatttccacggtacgggacattacgatcataggaataattagcaacgatagccatcacagcaaaccaggcaagcagaaaggttaatccgattttattcgtcatattatacactaaatttgaattgattaaacacaaaaaacattttccaaaagtaatcagctttttacaactaagcaaacaatctgccatttcgcacagggcaatcgcatcaaaatcataaagcgtccatccgttttcgccaccgatacggactaattacatgaatgtttttgcaaaagcaactatcatactatcatatccgcatgtgtatcggtttaaaccaatatattatgttatgatagttaccgttttgaactatcattcatctgtcataaccatcatggtgaaaaacgataacgtgctgtgtattaattgtacgataaaaacagggaccgttcgggaacaggtacgaaacctgttaaaacggcttcttttttcatcaagacaggcttttcttttgtcaaaaacagcttgcaaagccgcttgagacccgggtgtacccatcatggagacccgggtgcgggagaggtgtagacccgggtctgtgcgagacctttacgggggtgtggggatgtttatccgccatgttagaagtgtttttatgccctgtttttgcatctttttcaaggaaaaaagtcgttttatatttaaacggccccgttttgtcaatgctattttggtgcggttagcctgccatttcccgccttctttttccgataaagccgattatttcctatttttgtaaccattaacaagtatcttattacctgtcaacaactactatggttctaaattatatctggatcgctttctttctgattgctttcgtggtggcgctttgcaaattagtcatcggcggagacacggaagttttcacccatatcatcaacgcttcttttgcttcggcaaagacagggttcgagatatccctcggactgacgggagtcttggctctttggctcggcatcatgaaaatcggggaaaaagggggcgtgatacaggcctttgcccggttgacggcacccgtgttcagcaagctctttccaggaataccgaaagaccatccggcaacaggttctatcttcatgtgcatttccgccaacctgttaggcttggacaatgccgccacgccgatgggactgaaagccatgaaagagttgcaggagctaaacacgcagaaggattcagccagcgatccgatgatcatgttcctttgcatcaacgcttcgggactaacgctgatcccagtctccatcatgacctaccgggcacagatgggagcggcaaaccctgctgatgtcttcctgcccctcatgctcgcgaccttctcttctaccctggtcgccatactggaggtctgtatcaagcaacggatcaacatcctgcaacggaacctgctgcttttcttcggcgggatgatcgcgttcatcggtggtctggccttgcttttcgggatgatgagccagcaatcggtctccctctactctaccctgtttgccaacattttgcttttctctattatatgcggattcattatcagcggtatccgcaaaaaaatcaacgtatacgacacctttatcgaaggcgcgaaagagggtttccagactgccgtgacgatcatcccctacctcatcgccgtattggttgccattgccgtttttcgggcttcgggagcgatggatttcctgatcgacggcatccgcatgggagtctcggcagcagggctggacacgcagttcgtggaaggtctgcctaccatgctgatgaaaccgctcagcggcagcggggcgcggggtatgatgctggatgcgatgaacacctacggcgcggattcgttcatcggccgcctctgttccatcgtgcaaggatcgagcgacacgactttctacgtcgtcgccctttatttcggcagtgtcggaatccgcaacacctactatacgatcccctgttcgctactggccgatttagccggggcggtggcagcggtcactatgacgtatctgttttttacctaatatcaaaatgacactcctaccccatgtaaatcggattagtagtgcatctatcttggaattagcatagcaggtaattatttttaacatatcattcggtaagataaaacataaaaagaataacaatatggcaatagcattctacgcggaagacaccaagcttccggcaatcaaaaagagagcggtcggcaactgggtaaaggaagttgccgccacatacggtaagaaggtcggcgatatcagctacatcttctgctccgacgagaagattctggaagtaaaccgccagtacctccaacatgattattatacggatatcatcacgttcgattatacgagcggcgataagatctccggcgacctgtttatcagtctcgacacggtgaagactaattccgaagccttcaacactccctacaacgaggaactccaccgtaccatcatccacggtatcctccacctctgcggcatcaacgataaaggacctggggaacgcgagatcatggaggccaacgaaaacaaagccctggcgatattgccggaggaatgccgggaaagtcaactttcccggtaaaaagaaatgtctggagccgcttcctgttaaggatgctactgaagaggttgtatgatatgtgtgcctgataaaagcctgcacatgctccggtgaaaacagagattaccggagcaatgctcccaaaaccgattactcactatcactacccaaatactcataccaaacggctatttgcttatttgccggatactcccccgatattatcacatagatttggatacctggaaacaggcaaataagggattggtaacaataataaatgatccggcatgaaaggcacaactattttctttctatctattctgttaataacaacaggttgcaaaagactggatcaaacggcagacgacttgatcacagtagatgtaaccaataattcttttcccaaaaaggaactggctcttcaagatttcatggatgtagaatatatcccgctggaaacaaacgatgattttgttaatcaagggtttgtgcaggctataggtaaagaactcatattagtaaagaactatagggatgacggtgatatttttgtgtatgaccggaccggaaaagccattcgtaagataaatcgtaaagggcaaggaggagaagaatacatctcttgtagaagtgttacattggatgaagaaaacaatgaaatgtttataaacgatttcttggcaagaaaaataaaggtctatgacttggagggaaattttaaacgaagtatcaaacagaaacaagatggtgatacccagttttatttggatatatttaattacgataaagagaatctgatttgttacgatgagtgcaatcaagagataccattcctactcgtatcgaagcaagacggaaacataaccaaagagattagaaccccatttaaagaaaagaagctatttcttcaacttttaagacatgaaggaggaacgagagctgccggaccgggcgaatacagtagaataatcccattcaatggcaattggattctattagaaccctcgtcagacacgatctacacattaatgcccgattacaatttgcggccgtttatcgtgcgaacacctcctattcacattatgaatccagaatctttcttggttttaaagttggtttccgatcgttattatttcatggaaagtataaagaacgtatatgatttcagcaaagaagaaggctttccgagaacctacttcgtgtacgatacagaggaaaaggatttcttcaggtatatcatatacaatggcgattattcttataaaaaagaattctatatggtcatgctgacccctatcaattccaaaggtgaattatgggcaactataaatgctttcgacctttgcgaggactataaaaaagggaagttgaaaggcaaactaaaagaagtcgctgcaacattggaagaggatgacaatcgggtgatcatgttggtcaaacacaaaaagtaatccttaggatatattaaaatcaaaacctttaaacggcaaaatcccgtcctgccaatttttagaagcatcggatcttatccgagattataaagggggaaagctaaagggctgattgaaagaagtggctgctacagtaattccatccttttcacaaagtcagaaataaaataaacaatatacaacaaacttttatttcaaatactcattcaaaacaaccatccgctcattaagtcaataataagcggtctttacgggatatatttgaagggtaattcaatgattcatcttatttttacaggtatgaaaacaacaacgctcctattgcttctcctttttctagtaaacagcagttcggctgaaacgttcatcccctatacccccgactctttgaaaaagggcgattgggtggaaatcgagtccgtccactactatccctatgtggctccgggcatcgaagaaaaggttccctggcgggcggaaaatatccgacgagtcatctttaaggcgaccgtaacggatctgaatgaacgtaccctcacccttgattatacgttcaagagcctgtacgattgcaggaacgataccgggaagcccggtttctactattttgacagccgttatcaacaggacttcacattcgatcacgggatggtcggcaaacggttcctgcgcgtcacatacgatcgggaaagccggaaagcacatactttagacaaacaagaaactaccttttcttactcgaaaaactatgttcctttcggagtaagacaggcagggttgtctgcctatccgggaacgactatccaggattccttacccttggacaaacagcttgcaccggcggtacaggatatcctgaccggctggcaggaagacgggatgcctcggctggcacaaaacacgcgggtcatcgacgcctcgttctcccttcctccgaatacggaatttacgtgtagctatgtcaatttcgacttgtctgacgattcgaccgtccacaagaagatattcatcccctacccgaccgaacacaaagtgggcgaacgggtgacgctcctgcttactccgggggattccatcacgcaagacaaagaattatttaccacaacacacaaaagacgttatcagggacggggaagcgaacaaaacaatttccaatacagctaccgaagattcgccgacctgtacgaatcagacctttatatgtacccttcgaacctcgaatctcccgataaaatgaaaaaagctttccaactccgcgaatctttgttccaaaatgtattagcgaaagattttaaaaacatggatccttattggcagatggtattcgaacgttcggaacagtatcttaaaggggcgcttgcccttcatctctatatgtatgccagcgataaagaagtttggcacaaaagcggcttggtcgactggcaagctccctatttcgtctcggtcaatccacttatcgattttgcatacagcatgcatcgaccggaggtcgctaattacttttattttttgaatgtttacacgatgtataagaaacaggaattgaaagcagataacctgaacctaaaaacacaaaaagcgaaggaaaaatatttattgaatccggcagatgattattatctgaataaacatatcctctccggctttcccaaatatcaagtaaacggaatgaatttacaatttttaatgcacgataaaacgttagctgaaactcaagaagattacaacgattttatccgctcctgtccggataccagcctgacaaatcagcttcgaagagcatacgataaactattgcccttcgaagccggaaaaaatatccgggaaagcggccttaagatagccgatagcctgcatctggtgaaaggaagcgaccgaaaatacatcctgctgtttttatcaacgagggaacaaggtcttccagcgccaagccttcaaaatgcactcgatttcaagaaacgcctcgaatcggaagggctggcctccatcgtacaactcgaattatattcaaaattccaatctaacaatgccaaacgggtaaagccttttaaagctatttccgatctgcaaatagaagaattaaggcgtaaggaactcggcaccgtgactatcctgatgcgtgaagacgggaccatcctccatcggcaatttacgaattggcaatttgatcccagcctcgccttggaaatcattcaaaacgacctgaaacgggaagacgaatctttcaacgattttctaaaaggattcaaagaaggagtattaggtacgcttttaatcgctgcaatcatcggtatcgcttattattccagggtgaaagggaagcaaaagaaggaacgtaaccgccgccgtatccgtgaactcgaactacgcgccatccgttcacagatgaacccgcattttatttttaatgcgctcagttcgatccagaatctgatcaaccgatcggccaatcaggaggcgaataagtatttgatcgacttctcacgcctgttgcggaaagtgctggcgacttccgaaaagaagctggtttccctctccgatgagatagagcaactacaactctacctgaagctcgaacaactccgtttccccttctcctattcgctggcggtaggcaaaaatatcgaaccggatgcgatcgagattccgggaatgctgatacagcctttcgtcgaaaatgccgtcaaacacggaatcgctccgcggggtacgggagaaatcataattcgattatctttgcaagaccagttgctggttatcgacatcatcgacgatggtcccggaatggtaactgaaacggaaagcggcttcggtatccgtgccatcagcaacgagttcgagatattaaaggatttgtacaatacggaaatcggcataacgatcgaaaacaggcagaagaaggaatctgtttccggttgccatgtccggctatccatccctttataagacaaaatatggacaccaaaataaccgcagcaatcgtagatgacgagcaggggaaccgggagaacctgctccgcatgatcgggaactattgtccgcagatcaggatatcggccatttgcagttccgtcaccgaagcccgtaccgtgctgcccgaagctaaaccggacatccttttcctggatatccggttaggcgacgacaccggtttctccctcttaggcagccttccggaaattcctttcgaagtgattttcgttaccgcctacgatagctatgcgatccaggccatccgcttcagtgcgctcgactatctgctgaagcctatcgacccggaagaactgacgcatgccgtagacaaggcggtccaggtcgtccttcggaaacaggagaacaaacggatgcagaacctcctgcaaaacacgcaagcattggacaaacaaaagaaaatagctctgtcggtcgccgataagatagagtttgtagaaatcggttccatcatccgttgcgaatccgaaagcaactacacgactttctatttgaaatcgggagaaaaactgatcgtatcgaagacactcaaggagtttgacgaactactggccccttaccatttccttcgcgtccaccaatcacatctgatcaacctggatgaaatcaaaagtttcatcaaaagcgacggtggatatatacgcatgaaggacggagcctcggtcagcatttcccgccaacggcgaaactatgtgatggaagtattaaaacaattataaaccaagccatctaaataactgctcattccttatatttcaaatcgaaacggccttccgtaatgcgtcctccctcgaaagtgccactgaacacgccgtccgacatacgggagatgtaaaccttgccatcttccatattttgattttcaaaagagagattcacataaggaagcgtttctccctccttggggtcggcaatcgtaaaacggatatacgaaccgagaccgacctgcgccgaaaccgtcacgctggaaccctcttcccgctccaaatattccgcagaaggcatcccccaccggccgcttgtatacacccagccgtcaaccaagcaaccaaatgtattcgccccggtcgtagtagcttcgggcatgatcgtcggatcgaccgattcgttctcttcacaggccacacaaaacagcaacaaacagataaataacagatgtctcataaccgtatctgattaaaagtgtaaattcataccgaacaataaggataattgggagaaacatcctccgccaccgctcaattcaggagattcgacctgccatttctgaccgtgatacctgaccgaatagctctcggaggaggtaacgatccaattcaattttgcagaaatccccaccaatggagaaagacgatactcgcctcccgccgacagattataggccagtttattcattgacacatcccgcgacttgccgtacacaaaacttttatctttataatgctgatatcccaccccagtcgataaagacagattgtatttctgcttcaccataaacaaggcaagctgaggcgcgatataatgcatcaggatcttgtcggaactttcgtcatgagtatttttataacgtccaccctgatagataagtccgggagcgagtttaaacgaaccgaagatatatttgtctcctaagaaataataattggcatcccaggcgatcccattccgcaaatcattccgataagcatcggagttgttcgtgatcccgatcattttccccaaataccaggaaggccctgcatgaacggagaatatcgacttcccgacagacgtctcctgggccaaaaccgacacagcttgtatcaacagccctaacaaaagtacatactttttcatatcatttcttttagacttataatcataaatataagatgctcaaaaccagtcaaacgttgcacaggctgttacgacaagatcgtattgtttctcctatcctatcttcaaagcatcgcatggttcagataatggataaattcaggatcatcgggtgcaatgataaagttaccacggcgggaagtcgtaatcagaatacggttatcagaacgccgggcaaaaacttttacacgtccgatagcagtagaagaaaaatatccgagatcaccaaacaaccaaccgacaccaaatgaacggatcattattcctaaatccagccggtcgacctcgcgaaccgaaaggatttcctctatgtttatatacgtcttccgaaaatacgcatctatcaccagtttttctccatccacaataaaacggtttggcataaatcctcgagtaagcatacaaaggatcgaactgacggcaaacaaacctaacaaaacagacagattgccatcccaagccggaaatatacagataccatataaaagcagaagcatgacagacgtttttattttattggcattgtccatcgaagaagaagatatccgggtttccatactcttattcctttagtattacttagatattccaagactcacaaatataacaaaaatcccgtacaaactattatctttgcaaaagaaacaaagacaattaggacaatgactttcaattacgatgtgatcgtggtaggtgccggccatgcaggctgtgaagccgcagcggcggccgccaatatgggttcgaagacgcttctcattacaatggacatgaacaagattgcgcagatgagttgcaatccggctgtcggaggcatagccaaaggacagattgtccgcgaaatcgacgctttaggcggatatatgggaatcgtgacggaccggacagccatccagttccgtatgctgaaccaaagcaagggaccggcgatgtggagcccgcgctcccagagcgaccgcgcccgtttcatcgaatgctggcggggaatactggaaaacctgccgaacctgtatatctggcaggataccgtacgcgaactgttgctcgacgggaataccgtatgcggcgtaaaaacggatatgggagtcgagttccatgcgaaaagcgtggttctgacaaacgggactttcctgaacgggcttatgcatatcggacggacacagatcagaggcggtcgtatagccgagccggctgcaaccggactgaccgaacaactggtctcattaggcatcaaatccgaacggatgaagaccggaacgcctgtgcgtatcgatgcacggagcgtacacttcgatgaaatggcggaacagcccggagaaaacgacttccataagttttcttatatggacacctcgcaccgcgttctgaaacagctaagctgttggacaacgttcaccaacgaagcctgccatgcagtcctgcgcgaaggcctccccgactccccgttgtataacggacagatccagagcatcggcccgcgctactgtccgagcatcgagacgaaaatcgtgacgtttgcggacaagccacaacaccaactcttcctggaaccggaaggtgaaacgacacaggaatactacctgaacggcttctcctcctcccttccgttggatatccagctacgtgccttgcaacagataccggcattccgggacatacagatctatcgtccgggatatgctattgaatatgatttcttcgatccgacgcagctccaccataatttggaaacaaaacaaatccgcaacctcttctttgccggacagatcaacgggacgaccggatatgaggaagccggcggacaaggattggtagccggcataaacgcacatatcaattgccacggcggagatccgttcgttttaggacgcgacgaagcctacatcggcgtactgatcgacgatcttgttacgaaaggcgtcgacgaaccctaccgtatgtttacctcacgtgcagaatatcgcattctgctccgccaagatgatgcagacatgcgtttgacggaaaagtcgtatcatctcggtttggcaaagcaggaccgctacgatctgttgaaagagaaaaaggcaagccgggatgcgattatttctttcgcagaaaactactccatcaaaccgcaatatataaacagtggcctggaggcgttgggcactaccccgctcgcacacggatgcaagttgatcgaactgattccacgtcctcagatcaccttggagaatatcgcggaactggttccggcattccggacagagctggacaaggtccctgtttcacgaaaagaggagatcatcgaagcggcagaaatattaatcaagtatagcggctacatccgccgcgagcagatcatcgccgacaagataaaccgcctggaaaatatccatatcaaaggcaagtttgactacaatgcgatccagtctttgtctacggaagcccgccagaaactgacacggatagacccagacacgatagcccaggcaagccgtattccgggcatctcaccgagcgacatcaatatccttctggtgatgctgggacgctaaacgtggaatgttccacgtgaaacatttactttaacaacaatagcgtaaaagactgaaaataggatagaaacagatgcaaaaagcaatgagcgcaaccgaggaacatataaaaacaatcctttccgtcataccggaatcgcctggctgctaccaatactttgacgagaaggggacgatcatctatgtaggcaaagcaaagaacctgaagcgtcgcgtttcctcctatttcaacaaagaacacgacagcaacaaaacacgtgtcctggtcaagcagatacgagacatcaaatattttgttgtcgacacggaagaggatgcacttcttttggagaataacctgatcaagcaatatcgtccccggtacaacgtgctattgaaagacgacaagacctatccgtccatcgttgtcaagaacgaatatttcccgcgcgtattccaaacccggaatatcgtacgggacggttcgcgctattacggtccctacccttccatctatacggcaaaggtcatgctgcaaatgctgaaagaactgtatccgctacgtacctgcaaatatcctcttactcccgaatccattgcgaaaggacggtataaggtatgcctcgaataccatatcaagcgctgcaaagggccttgtgaaggattgcagacattggaggaataccagcaaaacatttccgaaataaaggaaatcctacgcgggaatatctcgcaaataagcaaacatctgtatgaagagatgcagaaactggcaggagaattgcggttcgaagaagcacagaagatcaaagaaaagtatgaagtcatcgagaattaccgctccaaatcgacagtggtcaccccgatgctccacaatatagacgtattctcactggccgaaaacgagaattccgcctacatcaattacctgcatatcggcaacggagcgatcgtgcaagcctatacattcgaatataaaaagcgtttggacgagtcgaaagaggagttgctcagcttggggatcatcgaaatgcgcaaccgctttaaaagcactgcacgcgaaatcatcgttccttttccgttggatatagaactggaaaacgtttcgatcaccgttccgcagcgcggagataaaaagaagctggtggaattatcggaaatgaacgtgaagcagtataaggtcgacaagctgaaacaggcggagaaactgaacccggagcaacgcagcacacgtcttttaaaagagatacaggagacgctccatctccccaaattaccggctcatatcgagtgtttcgacaattccaatatacagggaagcgacgcggtagctgcgtgtgtcgtcttcaaaatggcgaaaccatcgaaaaaagattaccggaaatacaacatcaaaacggttgtcggcccggacgactatgcctccatgaaagaggtcgtacgtcgccgctaccagcgtgccatcgtcgaagagactcccctgcccgacctgatcatcaccgacggtggaaaggggcaaatggaagtcgtacgcgaagtgatccaggacgaactgcacttggacattccgatagccgggttggcaaaagacgggaaacaccggacttcggaactcctgttcggcttccctcccgaaacgatcggcatgccgatacaaagtttcatgttcaaattcttcacgcaaatacaggacgaggtgcatcgtttcgccatcactttccataaggataagcgcagcaaaagccagacaaaatccgaattggatacgataaaagggatcggagaaaagacaaaagtattacttttacgtcattttaagagcgtaaaacgaatacgtgaagccggcttcgacgaactgaaagaggtaatcggagaagccaaaacaaaagcattattaaatggtttaaaataaagatatgagaacattgatacaacgggtacagcatgcctccgtaaccatagacggacagctgaaatccaaaatcgggaaaggtctgctcgtactggtcggtattgaagaccgcgacacgcaggaagatatcgaatggttgtgcaagaagattgccaacctgcgcatctttgacgatgaaaacggcgttatgaaccgttctgtcgtcgaaacggaaggcgaagtgatggtggtcagccagtttaccctgcacgcctccacaaagaagggaaaccgcccttcctatatccatgcctccaaaccggacatagccattccaatgtacgaggctttttgcgccaagatgggcttgcagatcggaaaggaagtgcagaccggcacgttcggcgccgacatgaaagtggaactggtgaacgacggtcctgtcacgatctggatcgactcacaaaacaaagaatgaaaagatatggcagaaattacgcttaaacaggcacaggagcaggtggacagctggatcaaaacgtatggtgtccgctacttcaacgaactgacgaatatgaccattctgaccgaagaagtcggtgaactggcccgcatcatggcccgcacatatggtgaacaatctttcaaggagagcgagaaacaccgcgatttaggcgatgaaatggccgatgtcctatgggtattgctttgccttgccaaccagacaggcgtcgacctgacggctgctttcgaaaagaacctgcaaaagaaaacgaaccgggataaagaacgacatataaacaataaaaaactataagattatggtacacgaacacgatcacgaatgtggatgcggacatcaccatcatgatgaagacaccgaacatctccacaccaataaataccagcaagcattcgccaaattcgaggcggccggcacaacggaagaagtgaccggacgggtaaaaacactgctcggaaaacatgggaacgacaacttcactcccgacgttttgaagcagattcacggtttcatcgacctgacttccctcaccagtatcgacacgaaagagagcatctggaaactggtcgacaaggtgaacgatttcgaaggaacccgccccgacgtacccaacgttgccgccatctgcacctatcccctgtttgttgagacggtaaaagaggccctctccgcacaggaggtaaagattgcgtccgtagcaggcggtttcccttcctcgcagaccttcatggaaataaagattgccgagacagcgatggccgtcatgcagggagccgatgaaatcgacgttgtcatgaacttaggctatttcctcgaagaaaattatgacgaacttagcgaagaaattcaagagatcaaagaaagctgccgtgatgccaaactgaaggtcatccttgagacaggtgctctccagactcccgaaagcattcagaaggcggctgtcctcgcagtctattccggtgcggacttcatcaagacatcgacagggaaaggttatccgggagccactccggaagccgtttacacgatgtgccaagtcttgaaaaagtaccattccatcacgggaaaacgtgtcggtattaaagttgcaggcggtgtccgcacggcagaagaggctgtccgctactataccatcgtcaaggaagcattaggaaacgattggttgaataaagacctgttccgcataggagccagcagtttggtggaagacatcgaacaccgtctgggaaaataagaagaaaagcaacgggatatttctcacaaacccatagtcttttcttccaaagataacgacataaattcggctacacccggatgttcccacctgctacacccggatctaccttaaacgaacacccggatgcagggatcgcctacatccgggtgtcgtcgtgtttatataagcagtttattcatctttctctgtatcttccggaagtttttccaaggtgctatgcgcattcaagggagagatatctttatttagctgtatttcaagcaataatactttaacaaaaggggaacatgatggtatgatagataaacatgatagatggaaaagcaactatcatatctgaatcagcttgatattcaaagaatacaagaagaaaatgatagtatgacagtaaaacgtaaaaacttatttacggcgttctacgatgtaatcggcaagcagcagcaaaccttcgcgtgcttccgattcaggaagtgtcatcaaaacctcgaccgctttgtcatgatatacctgcatacgctgttcagcatattcgattcccccgttcgctttcgcaaaatcaatcagcaaatctatattctctgtggtaaagtctttttcatttatgatatgaaggcaatgttctgcctcttctctcctacccgtctgcaacgcgtgcagcaaggggagcgtgacctttccctcccggatatcgttgccggtcggtttgccgatattcgcctctttgaagtagtcgaagatatcatctttgatctggaaacagtaacctaagtattcgccgaactcacggcatttttccaccatttcaccggatgccccggcagagatggaaccgatctcggcacaagcggaaagcagcatggccgtcttttttcgtatcacctgcatatagcaggattcgtcgatgatgctttcttcggccgtttccaactgcttgatctccccttccgaaagatcgcgtccgagattggaaacaatacctatgatttgcagattacctgtctggatagaacggatcaacgcggtggaaaggacataatcgcccactaagacagaaatgcggttatcgaatatggcattcaaggaaggaaccccgcgacgctgttttgtctcgtcgatcacatcatcatgaatcagtgtagcagtatgaagcagttccaacagaacagccgaattgatcgtattatccgttacctgcccacatgctttagccgtcaaaagtactaataaggggcggacatgttttccgctcgcattcagtatctggtcaatagctgattgcaaacgattcgtttcgcttcgcagcgaagcagcaaactcatcattaaaacgtttaaactctacggcaaccggttgttctattttacttctatccttcataattgatcctaagatgcgcaaaagtaacaaaaagtatcgagtaagcgagttttttcgtacatttaccgacaattgtcacactaaaacgtgttaaaagagatgaagttattcctcatagatgcatatgcattgatttatcggtcttactacgcttttatcaagaacccgcgtatcaactccaaaggcatgaacacttcggccatcttcggttttatcaacagcctggaagatgtcctgaaacgtgaaaacccgacccatattgcggtaggcttcgacccgaaaggtccgactttccgccacgaagcctacgaacagtacaaggcgcaacggcaagagacgccggaagatatccgtaagtcggtccctttcatcaaagatatcatagaagcctacaatatcccgatactggaagttccgcgctatgaagccgacgatgtcatcggcacggttgccaaacaagccgaaaaagaaggtttcgaagtttatatgatgacaccggacaaagactacggccagctggtatccgaacatatattcatgtaccgcccccgcttcggcggtgactacgagattatgggcgtacccgaagtactgggcaaatacggcctgacatccgtcgaccaggtgatcgaccttttaggactgatgggcgacagttccgacaacatccccggatgtccgggtgtcggtgaaaagaccgcccagaaattattggccgaattcggaacgatcgaaaatcttttggagaataccgacaagctgaaaggctcccttcaaaagaaggtcatggagaacatggagcagatccgcttctccaaattcctggcaacaatcaagacggatgtaccgatccggttcgatgccgccaaatgcatccgtgaaaagatgaatgaggaacgtctcgtagagatttacactgaattagaattcagaacatttattaacagaatgagcggagagccggaaaaagtcaaaacggagtccaaaacagcaccggcgccagcaaaaaccggtacaagaaaaaaagcagctccggcaggcccgattcaaggctcgctctttgaagaatttgcgaccgaacctacggctgttcccaaatattcgactctcgcgaacttaaagtctactcctcacacctatcatcttgttgatacagaggaaaaaagaatagaattagggcggtttttgaacgaacaggatttttttgcttttgacacggaaacagatggtatagatccattgaaggccggattggtcggaatgtcgttcgccgtgaaggaaaacgaggcctggtacgtccctgttccggcagcccgcgaagaagccgacaaagttcttgcccacttctcccccgccctgcagaatccgaaatctctcaagatcggacaaaatataaaattcgacatccttgtcgtccgcaaatatggaatccggatagccggccctctattcgacacgatgatcgcccactaccttctgaatcccgaactgcgtcacggtatggactacctcgccgaaacataccttaaatataaaacagtacggatcgaggaactgatcggcccgagaggaaggaaacaacttaccatgcgtgacgtcccggttgcccaagtagccgaatatgccgccgaggacgcggacatcacgctcaagctgaaaaactattttaccccctgtctggaaaaagaaggactcgaatcgcttttttatgacatcgagatgcctttaatatatgtattggctgaaatggaatatacgggagtgacgcttgacaccgtcgccttgaaacaatcgtccgaggaactgacgaccgcactcaagaagttggagaaagagatctacgaactggcaggaatgaagttcaacatcaattccgcccggcaggtcggcgaagtccttttcgatcacctcaagatagaagagaaagcgaggaagacaaagacaggcagctatagcacgagtgaagaaatactggaaaaaatgcgttccaaacatcccgtcgtgggaaagctgctcgaatatcgcgggctgaagaagctgctcagcacctatatcgacgccctgcccgaactgatcaacccggaaaccggcaagatccacacgtcctacaaccaggcagtcacctcgaccggccgcctcagttctaccaatccgaacctgcaaaacattccggtacgcgatgagttgggacgtgaaatccggaaagcctttacagccgaaaacgaagactgtattttcttctccgccgactattcgcagatcgaacttcgcatcatggctcatctgagccaggatgcccacatgatagaagccttccgcagcggagccgacattcatgccgccacagccgccaagatatacggtattccggttgaagaagtcacttccgacatgcgccggaaagcgaaaacggccaatttcggcattatctacggaatctctgttttcgggttggccgaacggctgagcatcccacgcgcagagtcaaaagagttgatcgaaggatacttcaaaacctatccagacatccgtgcatacatggacgaaagcatcgaggtggcgaaagaaaaaggatatgtagagacgatctacaaacgcaaacgtttcctgccggatatcaactcccataacgcgatcgtacggggatatgccgaacgaaacgcgatcaacgctccgatccagggcagtgcagccgatatcatcaaagttgccatggttcgcatcttcaaccgtttcgaaaccgaaggtctgaggagcaagatgatcctgcaggtacacgatgaattaaactttaacgtctacaaagacgaattggaaaaagtgaaacaaatcgtgttggatgaaatggaaaatgcaatcaaactgcaagttcccttgatcgccgactgcggtgaaggggtaaactggctggaagcgcattaacaaaaacacataaagtttataaatcacagcatttatacactatctttgtcgtgaaatttattgcaaggagttgcaatatcacatagtaaaacagaagcgttatcatattgtccttaagcaagaaaatcgccaatttttcatccagcaaggacagtagacaacaattgcctcacgttttttgtatatatatacataatatataaacatcaagcgtgggctgttgtctatctgctggataggtgtttggcgatacctcttgcttggatagatggcagttcccacgcttttattatattttccgtcttagggggacagatggagcaattggaaaattatgtatttcatattccctgacaatcttccggtatccgtacaaaaagcagcgttcgaattcacatccggacagttccccttgtatcgttacataacaccggatacagagatactgaatcggggtatttcaatcgctatcccggatgaagccagccacatccgttccatccgcctcacgacatcactgagccatttcacttactattaccccgaaaaaggatataagatcgcgcaaggtatccatcttccccctttccgggttccggcagtcggagatctctatgcaaacggcgtgatcatacaggctggagcagattctcccggtcagcatatagaacccgatatagccccttataaaggttcggtaatggagatacgggaacagacactcgattatttcgatgccttgatctattgcgagtccatttccgaagggaccttagacaattggcatctgccggatatgctcaatctggtattactgcacaccaggcaacgggaattcaacatgttcctcgccaagtatcaaggaacttttttatacgacgaggaatactggtgcaaagacaacagcgtgatcgatctgggagtagcattcaatatggcaaacagccgcctcgctatatgccccaaaaaggaaaagcggcaggttcgggccatactggattattaaaagactcaaattcctctcccgcttattcgcccaaacaatattttctatatccggttcgcctgtatccggcaacataaatacaaaagattgtatatctttgcagtctggaaacaaagtttgaataaatcataacaacaaaatagaatggcattacaatgtggcatcgtaggacttcccaacgtaggaaagtctactcttttcaattgcttatcgaatgcaaaagcacagtctgctaacttcccgttctgtacgatcgaaccgaatgtcggcgtgatcaccgtaccggacgaacgtttgaacaaactggcagaaatcgaacatccccagcgtgttatccctactacggtggaaatcgtagacatcgccggccttgtaaaaggcgccagcaaaggagaagggctgggaaacaaattccttgccaatattcgcgaaacagatgcaatcctgcatgtactgcgttgcttcgatgacgacaatattgttcatgtggacggccgtgtcgatccggttcgcgacaaggaaatcattgacaccgaattgcagatcaaagacttggaaaccattgacagccgtattgccaaagtgcagaaacaggctcagacaggcggtgacaagcaggctaaaatcgcttacgaagtactttgcaaatataaggaagcactggaacagggtaaaagtgcccgcaccgtttctttcgatacgaaagacgaacagaagatcgcacacgatctattcctgttgaccgacaaaccggtaatgtatgtctgtaacgtagatgaagcaagcgcagtcaacggtaataaatatgtggatgctgtccgcgaagccgtaaaagacgaaggagctgaaatattggtcgtagcggccaagatcgaaagcgagattgccgaattcgacacctacgaagaacgccagatgttcttacaggagatcggtttggaagaatccggcgttgcccgtctgatcaagtccgcttacaaactcctgaacctgcaaacattcctgaccgccggtcccgacgaatgtcgtgcctggactttccataaaggatggaaagccccgcaatgcgccggtgtgatccataccgacttcgaaaaaggctttatccgcgccgaagtcatcaaatatgaggattatatttcttacggttcggaatctgctgtaaaagaagccggaaagatgagtgtcgagggaaaagaatatatcgttcaggacggcgatatcatgcatttccgctttaatgtgtaattacctaaaacaaaatacattatgattgataaaaccagtacagcattaatagtggccttgataagtatcttagggcttaccagctgcatacgatacaacgttgcagaaccattagaccgtttcagcagtcccgaaatgggaactgccgacggtaatgaaataaccgtgacagccggatcgacctggtttgctgaaggagaatatgagaactttatacttaccgggcaagctctcaccggggaaaatgcggaagcggccttgttgttccatcataccgacgggaaatcaggctatgaggtagcattccggaacggagccatcgacggcacacgtaaaagcggcagcctcacatccgtgcgtaacctctaccgttcattagctgaagacgggaagtggttcgactttgaaattgctgtacgcgggcataacataatgattgccataaacgatacggtagtagtatgctataccgaacccgaacacccctatcgtacaaaagagtatgccgggcgcttgctcagccacggttctattgcactaaaaggtatgagcggtgatgtagcctttcgtaacctcaacatgacccgcttgaaaaaagacgcggtcaatgaggcagatacaatgccacggatagacgaacagaacgatgctgtgatccgtttccagcagcaaaacttccccgtgatagattaccacgtgcatttgaaaggcggcctgacgaaggagatggcgcacgccatgtcaatgaactacggtatcaactacggtgtggctcccaatgccggtgagggtggcgtaggccgtatgcttgccgatgacaaggaagtgtacgaatactacaacgaagtaaaagacatgccattcctgcgcggtgtgcaaggtgaaggccgtaagtggacagccaccttctctcagaaggctttaggcgtattcgattatctctttaccgacggaatgaccattgtggaccataaaggacgtctgtcaaggatataccgccccgaagaggtacactacgacggtgttaccaaagaacaatatatggatcacttggtggaccagaccgtcaagatccttaccaatgagccggccgacatctatgccaatcctaccttcctgccggaagagttgaatgcagagtatgccaaatactggaccgatgagcgtatcgaccgcgtcctggatgtattgaaaaaacataacattgcactcgaaatcaacgcacgctacaaaattccaagcttcgacatcatccgcaaagcgaaagagcgtggaatcaagttcacctttgggacgaacaatgtcgatgccgatttcggcaaactggaatattgcctgcaagccgtcgacgaatgcggtctgacagcagaagatctctggtttccgactatgagcgtacgcggtactcgcgaagtggtgctgtataataagtggtaaaatcttctctttacaaataattttcattttcaggtgcgctgtctatacttaatcaacagcacacctgttgttttatagatactcctatcacattctatggaatattagaaagtgaccaaacttatcctctacagcaaagctggccatctcctgctggacgaaccgttcaacgcctctcctattgctgcagaagaaatacgtatgcacatcaccgaaagcgcccggacaagaggcattatcttgatagaccacaatttcagggtagtgcacaaaatagtaaaccgcaccctgcttctggatcaatgctacctaaagaaaaccaaggaaaagaaaaaattaatcccttacggtcattatcgtcccggctaattttagtatctttcagcgcatattaattctcaatcattatgaaaacctgttgtatgattctcttagcggctttcacgtcgctcgcatccgcccaacaaaacgacgtaaccagcatattggaagtactggacgtaacaaacggcaggcgcaccgtagtcaaagaattcccctaccgtgtcgaagctccaaactggacacccgacggccagtggctcgtgtataatagcgggggaaaactgtacaaactctcccccgattcgcccggcgaacctgaaatgataaacactggctttgccacccgatgcaacaacgaccatgtcatagctgccgacggcaagcagatagctatcagccacgggacgaaagaagacggcaaatcacgcatctataccctcccgatgcaaggagggacacctcgcttgatcaccccgattgctcctagctacctacacggatggagcccggatggacggcaacttgcctattgtgccgaccggaaaggcaattatgacatttacattattccagttgaaggaggagaagaaagacagctgacgacagcagaaggattggacgatggtcccgaatattccccttgcggagaatatatctggttcaattccgtacgcacgggtttgatgcaagtatggagaatgaagaaagacggctccgaacaaacccagatgacgtttgacgaaacccgcaattcctggtttcctcatgtctcgcctgacggtaaatccgttatctttatcacttattataaaggagatctggaaccggggcagcatcttcccaataagaacgttgaacttaggattatgccagccacaggaggaaagccaaaaacattagtcaagttattcggaggacagggcacaatcaatgtcaattcctgggctccggatagtaggcgcgtcgcattcgtcagttaccgcctctcctctccttcatccaaataagcattcttggcggtgtcaaaactattctacccccacgcttaacgcaccgccaagcttttacattatatagaaaaacatcatttctaataaaaaaaggaatgccgtaccgacattccctaccaaacacacatttacctcttatttcataccatatttctgcattccatattcacctaatatttcaaggcatctgaggcactttctaaaaaacttcttcatagcttctctctttttgtttaaaacgactcatgcaaaacacacccgcattagtattgcataattatgttttacaacacaaaaatagaggtaaaacagatacgttattcacctcaaaatgtctatttaacatcatttgtacaaacagccgaacaataaaaaagcaccttagcctatgatatatttcgcatgtggcaacttactcaccagataagtaaatgaccatgaacaaataaaggtaagaatggtcgaaacaggaaccaaggccggaataggtgttccaatccactgcgcgaacatataggaagggccgacaaagaaataatgcacgcaatacaagccaaaaccacatttggtcagattggcaagggcacggcaaataaccggcgaagtaatccgtactttccgtaccaacaagaaaatggctgccgtcatcaacaatgcgttaggcgaacaataagtaaagaacaactccatcccctcctcgctcacgttcggatcggatgtcatatagcgaaaaccgactaatgtaataaaatagccaactaaaaacagcggaaccgtcaccgagaaagtcttgccaagcgaccaatccgttcttttccctaaataatgtcctaacagcaaatagccgttgaaaccggcaaaataataaaatagaccgaatgaattccatgagcaggttccgaactggtaatgcgaaacaaactccgtcagataagggataaacaacgaaataaaccaaaacgccagaaacatacgcttcgccttatccgacgccttttccacccatgcggaaaagaccggcatatacagataaagtcctatcagcacatagatataccacattggcgtcgcatagaccgtaaaggttacagggatcaaagcgatcgtcttcaacgcctctacaaacgaggccgaagggttcggttcccaagggaaaaagtccgtcaccagttccgggctgcctcctatccactggatgaaccaaggcgccagatcaaacaaaacagaccagatcagaaatggaaacaacacacgtggaatgcgtttcttataaaaggcagaagcctcttgcctgaccggcaacaaaagaaatccggtcatcatcacaaaaagcggcacactggcacgcagcatggagccataaacagaaccccagaaattgaactccggattggcacgcgattcaggcgaagcgttaaacggatcagtgcaatggatggcaatcaccatcaagatggcgacaagacgaagaacatccagccagacaatatgcggtctggcagtagtagtttgaacagtgtccatgatagaataaagatcgttatgtatttatttgttattcttatactccgacgggatcatgcccgtacacttctggaaagcccgccggaacgtactgatcgaatggaatccggaacgttcggcaatctcctgtatactggcattcggctcggcatccatcaagcgcttgctttcctcgatccggaactggttgacataatcggagaacgattgtcccaactcccggttaaacaattgggaaagataagaacggctgatagggaagatccgttgcaaatccgtcagacgtaaatcttcgcgaagatacggtttttctctttcaaaccatgcacttacttcctctgcatagcgtttactgagaaccctgtgttcatcatcgtcattgtcgtcctcttgatacggaagatcccatccgcttttaaaagaatgctccaaaacaactaccttcagaaatagcgccttataaaagaaataataccaaacgaacaacaggactgttttgtcgatcacatacatcaatggtgtattggtcagcaataagacaagatagaaaccatacagaacaatcaaaattatcatggttttccttaaccattccaaatcatattcttccggatcggaaacattctctgctaaaaaaacattgaagtctttactgtaccttgctatcagataaacgggcagaatcatataaaacaaagtcagcagaaagactgtcatacgaagcaaaacatccatattcaagtattcgaaaacctcccttattgaatagtaggtatgaatttcacctcccgacaaacgataagtcaggtaagccagtccaccaaaaacaaccggactgataaataagaaaaaacgtttgcaggtaagaaacccgggccgtaagacctcaatcacataacaagcaagcgttgccgttaccaaagcacccataatcaatatatccggatggaaagcctctttcggtttatgcaggtaaagattcacagacaaccttatggcagccagaaaagcccacaaaaacataccccaccctaatatccttttcgcccggttatcaccggcccggagcaatagggtagctccgccgaagatacagaatccgatgatctgtaagcttaataaaaactgaattttgtccaacataatatatccctcgtatcaagtaaacaaattgaagcattaaatagttgatctgaaccattagtagacaatttgatgcctgtagataatttgcgcctcgtggttttatacgatttcatcgtggttttataccgaatgcaccctctacctctccaaactgactgatctttgtacctgcaatcacttcacaaaaataatacaaagaatgaataaattactactatttatgataacggcggttagtatttttagttgcacaaacgactacgatccgggactcattgaaaatttaggcatgaaagagcaacctttaagaataataacaaaggtgctgacaacaaagtctcctaattttatgcaagaatttacaagaggatcggtcatcgggttgcatgtcgtctcggaaagtaccggcaacatctacgatagtaatccggattacaaaaacgtgcgggctgaagcctttctggtaaactacaagctgaactggcgccagtcacccgatatttatctgaacgaggaaccagtcactgtttatgcctattacccgtatcagtcgcaggttaatttcgacccggagaatatcccggtccgcatatcgccagacgcttccctgacgaaagattacatgtacgggatacaggccagcgggcaacgagcggtcaaccagatttccccagtcgcgttgcttaacatgaatcatacgctttcgctcctgagcttccaactgcgaatgacaccggaagcagaaggctgcttcctacttcatgcgatacagatcggaaacaaagccggcggtacagctctttgcttcaggggtaagatgaacattaaaaccggaaatatcggcggatgtgccgggacaaatgcctctacccgactgaaactgaatactccgcgcatgttgaaaaagataccggacgagccgcaacaactaatggtaatccccacatcgcgtatcagaacagacggagatgtggaagtgctcttcatcatcaacgaaacgacattcaaatataaaattcccgccaatacgaagtgggaaaaaggaaaaagatatatctacaaccttcttttcaacggtaaagacatcacactcgaaaatgtaagtaccagcgaatggcttcctgttgaagggaatatggaaaatactattctgtaatgtaagttttattttatgttcggttatgtcaggtgtaacagccgaatatcgccactcaaaagacatatgaaagcgccccgcccattttatcccttctcaacttatcgccaacaacacacctctattcaaatttaaccaggacggggccgcttttcatctcacttctcatttacaaaaatatttatgcatgatgaacttgtaactgaatgtatcatatcccatgcactcgtcaagctacggaacccccaatatgtaactgtttgagcactcacatctcctgatactagtctcttaaataaacaagggcagtccatacattgtgaactacccttgtttcattctataatcaataatattttcaggaaaataataatttatctctcactccggtctctgcccttaacgctcaccagcttaggccggagcaagcctgacggttagatcttgcctgacgttccggaagaagatatgccggttacagtgttgcgatccgatgttttagaagcggaggacgttgtttcagaagctatatttgtagcagtcgcagcagttccttctacctgtttgtcgacttcccaatggaacggttcaaaggcagtattcgggtccacccaagacgtttttttggcagcatagataatgaacggagcggctaccaccacgatagcgccgataatcagcacggcaaaccaaacggtattgttacctgtagaaatttgactgggcggaataaaactcagtacgaaggcaagcaatgaaccgcaaaaaccaaggccgccgataaaccacatcagaccgttgccactcttaccgatacggaacggacgaccggctttcttcatccgataacgcaatgcgattgcaccagagaacatcagcatatacataatcaggtaaaggataactgtcaactgtgacaaaatctgatagaaactttgtacggaaggcataaccacgaacaacaagctcaggaatgtaacagccaagccctgaaccagcaggatatttttctgcacacccaacttatttgttttctggaagaacggaggcagataaccggctttgccaacggcaaagataccttttgacggaccggccacccatgtcaatacgcctgccaacacgccgaaagccaatgcaactgcgataaccggcgacagccaagaagcatgaataaacttaaaatagttgtcaaaaccgaccaacaaactctgagtcaagttaatgtccttctgcgggataatgatacctaatgcaaatgttcccaacacgaagatcaacaccgtgatcagcgcaccgataaacacggccttcggataattgacggaagggttttcgacatctttcacatgaataccgcccatttccataccggcataaaaaaggaagatactggaagcaagcaccaggttatcgaacttcgtaaagtcggggaagaaattgctgtggaagtccatgttggaatgaccgccggaagccaggtacacgatacctaagataatcaacaaggcagcagggatgatcgtaccgacgatgccacccactttagccactttacctacccagctcagacctttcaaagagataaacgtagcgagccagtaaataatcaatacgacaaccagcgtatacattttgtttgaagccagcgtcatatcgtgcgcatcgttcatcccgataaaggcgatggatacagcaccgaaagtcaatacggtcggataccagatcgtactctcgatccattgtacccagatagccaggaaaccccatttctttccataggcctctcctacccatcggaataccccgccctgtttatcctggaacatggcagccaactcagctgccaccaacgaggtaggaattaagaacacgattgccgcaaacagataataaaaggctgaactcagtccatacacagcctcagcaggcaacccgcggagcgagacgactgccgtgacattcataatcgcaagagtaaatactccaagttttactgcttttccaatatttgccatgaattttactattaaaatgtgaattttgttttgtttagttttgcttgtattgacagtataacaactcgtttttgtgttagtttgtcaacaggatgtcaaacttggttaattaacagacaagtgttaaaaacaaaaagtgtcattttgctgtttcatcggataaaatgtaaatgatgatttacaaaataaataccaaatattaaaagacaatgagaactgcattcaatgactttttttatgaaaagcgaggcatttacggagtgcttcatgtgatgatattgctactctcgcttttcctgattgtggatatttcgatcgacacgttcaacaacataccgttcatctctcagacttcgtatctgaaaacgcagttctggatctgcatgttcttcatcgccgatttcatattggagtttttcctgtcaaaagataaaattcattatttgcaaacccatttcctcttcctgctggtttcgatcccttatcttaatattatcaattactacgatttcaccttctcggccgaagtgacctatttcctacgtttcatcccactcgtacgcagcggatgggcactggcgatcgtcgtcggctggctaacttcgaaccgggcctccggactcttcgtctcctacctgacgatgttgctggcaatggtctatttctccagcctgatctttttcgtgatcgaacagaaggtgaaccctgaagtaaaggattacaacgacgccctctggtgggctttcatggacgtgacgactgtcggttcgaacatcatcgcgatcacgcctacagggcgtattttgtcggtcctgctggccgctctcggcatgatgatgttcccgatcttcacggtctatgtcacgagcctagtacaatcggcaaacaagaaaaaagaagattattataatcaaacgcatcccgtctcctccggacaagcatcagaagccaaaccggccggttccactcaaacagacaaataaattcaaaactacttattgtaaaaaacaagttatttaacaattggcaggtctggcgatgaaagaattcaaatattcttctttttgaatataaaacgtatttttcccatttatttgccgatctattaccatgaagacggtcgtcatcgccaaaatactgcgcaactctttgcttttcctactcaggctgacaaaacagaagcaataaccggacaagttgcctatcacatactttctgttgtcaaacaaaaaccgtcaggccgaacaaaatgcaagattaaaatgaaaaactattcccgcaaaaaaacaagcctcccgtctccctattatttcaggggagtggaggctcgtcaactaaaagaataaaccgttttaaccggtgattgtaaaccgggtactgccaaaaatggagagccccagtttattcattatatatttgatcgccaattgtgctttcaccgaattgccggagctatccaatggaggcgcaaaggcggagattccgaagtgtccgggcatgatccccatgacaccgccgccaacacccgttttggcaggaataccggaagtgtacaaccagtctcccgtacgttcatagaaaccgaccgtagccactaaggatgtgattttaggcgacaaagaagcgtcaaagataagtttctttgtaaccgggttcacgccatcgttggcaatcgttgctgcggcgatggaaagttgttcggctgtgatacccaacgaacactggcgagtatacaggtcgagcgacatatccggatcgtcatagatacggttgtaattcttcagtaaccaggcgatagaacggttattgaagttggtggcagtctctgacttgtacagttcatcgatcagttgcggagcactcccgcaaaggtcggtgatgttggaaacgatggcttcccacttcttgtcggacttaccgagcggctgtaccatactgcaagccgtgatcgcaccagcatttaccagcggagtggaaggatggtcattttccaacaagatcgccatgatggagttgaaaggaagaccggtggcatcggcaccgatcatctttagcactttctcggctccgtactggcgaagtgccaggatagccgtatgtactttcgaaacggattcgatcccgaaacagtaggaagagtcccctaacgtaatggttctgccatccaacaggcagatactgataccgaacaagttcttgtcaatattagccagataagggatgtaatcagcattcttgccacccgtattatccttgaactgctcgtaagcctcctgtgccgcttcttttatctgtgaaacggaaattgttttactcatgatcatttctttttatggggcatacccgtatgagtaaacacagaacctttcacttcctgattcttatcctgtgcgatacgggtaggagtcggatattccagtttttcaagttccgcaacagctcctgtgatatcattcagcaactggtcagccatgtcgcgactaaatccctgacgggcaacgatacgcatcacgacatggttttcaagattgtttggcaatgtataggcaggaaccatccaaccgctttgtttcagtttatcctgcaggtcgtacagggtccatttcgcttttttcgcatagtccggtttcagataccagataaacaacgggttcacgacttcgttgctgtagttcacgaacggagccatcttaccgatctgatcatgtaagtattgggtaaccgccatgctgttttcctgaactgctttatacccttcgaacccgagacggataaattggtaatattgtccgaggatctgggcggcaggacgggagaaattcagacctacctgtgtgatattggctcccaaataatttacactgaatgacatggagtcgggcaaatatgacttgtctttccagacaacccaacccaggcccggataaaccagaccgaacttatgtccggacgtactgatggaaagaacccatttcaaacggaagtcccacttcaattccggtttcaggaacgggaggataaaaccgccggaagcagcatccacgtgaattggaatatcgtagccggtctttgtattgtaagcatcaagagctttgtccaaagcctccacatcatcgttcagacctgtccatgtaaccccttggatcggcacgatacagattgtattttcatcacacatcttcaatgcttcttcgggatcgagcgtagtcttctccaatgtcagaggcacctgacgcatttcgatctgccaaagctgggcgaatttttcccatacaacctgaaatccggtagaaataacgaagttcggcttatccacaggcttaccggcggcttgccttttcttacgccagcgcaaccaagctgcgacacctcccaacatacatgcttcggacgaaccgatagccaatgcaccggctttccattttgcctgttcgggagtattccacaaattggctacgatgttgatacatttggcgttcataacggcaatacgcggatattccgtttcatcgatatagttgatgttgatcgcctcgttcataagtttggttgcatagtcgtccatataggtagttacgaatgtcgccaggttcaagcggggctgtgtctgtgcaaacgtttcgtctttaaccatctgatacgcgatttccggggtggtaggaccatcagggattttgtctacaggagaggcttgtagcatcttttccgagccaaagattgctgtcttggcatcaccttttctgaaattagaatcttccatgtctttttgtttttaattaataatggcgctatcgacttgtttcggccgattgtatggcaaaaacagctactatccgcaattgttctgcgtttttcgttaaacatacgatatttggggtttattaaaacaatgaactttcactattcgggattgtttcaatacaataaaaaatgatgtaacgaaacgattatgcgaatacagaccggacaggggacgattcctcttatcacgctaataggcatatggtcgatatcggcactgaatgcactgcccggcctggctgtctccccaatcttaggaagactttctgcaatctttccgcattccacagaactggacatacagatgctttcatcacttccttccctcttgatcatcccttttatcatcctgtcgggcaaactgacggaaaagatcaataatgtccttctgttgcaagtgggactggtgatcttctcgttgagcggcatcctgtacatgctttccacaaaaatgtggcaactgataacagtcagcgcattattggggatcggttccggattgatcgtgccgctttccaccggtttgatttcccgcttttttacaggaacataccgtacgaaacagttcgggctcagttccgccattacgaatataacgttagtgctggccaccgttctgacggggtatctggcagaggtgaactggcatttgccgtttgtcgtctacctgtttccgctgatctcgatcgttctctcgttctatctgaaaaagaatatttcaccgtatcccggtataggcataaacaccactagccggagaacggaaaggcctaccaatagcaatttcgggaagttcggtatacagattccccacctgatgcagatcatgtcgttctatgggttggctacttacttagtgatcatcatcagcttcaatcttcctttcctgatgaaagaatatcattttaccagcggtaattcgggtattatgatctcgctatttttcttggctatcatgtcgccaggatttatactgaatcaaattgtctccttcttcggcaaaaagaccaaatttgcctgtatggtctcgatcgctgtaggaatggcacttatactcgtttcccgcaccgaatggttgatcgggctgggttgtatctttgccggattaggctatggtgtcatacaaccgatagcttacgacaaaacgacccgcacggctattcctgaaaaagtgacgcttgcactggcattcgttatggccatgaactatctggccattcttctttgccctttcattataaacatactcaaggatatgctccatatcgagacacagcagttcgctttcatcttcaatatggccattgccctgatagctgccgcatgggcctacctgaaacaagattcgttcttgttcgacgaccgcatcaaacaagtataacataaaatcccaagcatcgtgaaaaataaaataagagaagccaatatttacatgattatttccaaaactttcagcgggttgaatatgaatgcgttgaaatacctcctaccgctatggataagtccgctgatgggtgtaaccctgcgctgtacatttgccgcccttgcgttctggattatcggtatgttcaccaagccagagacatccagccgccgggaaaagattctcttattcctgttgggggcactcggcatttatggcttcatgttcttttacttactgggattgagcaaaacgacccctgtatcaagctccattttctccagtttacagcctatctgggtgttcatcctttctgtcatcttctttaaagaaacaatcacaaagatgaaaataaccggtatcctgatcggattaggcggcgcattgctctgcatcctgacacagaaaagcgacgacctggcttccgatgccttcaccggaaatctgctttgcctgctaagttccttagcttatgcaatctatctgattgcaagcaaccggatattgaaacatgtgggagttatgacaatgctgcgatacaccttttccggtgcggccttctccgccatcatcgtttctggatttacaggattcgaaacgacacttttcacactcccgatccattggaaaccgatggcagtcttggcattcgtcctgattttcccgaccgttatcagttacctgttaataccggtcggactaaaatatctgaaaaccacactggtggccatctatggttacctgatcctgattgtggcaaccattacctcgctggcattaggacaagatcgcttcagttggtcccaattaatagctgtcctcctgatttgttcgagcgtttatttcgttgaaatagcagaaagtaaggaaaaatcataaatttttctctttctttgtaacaacagcttttccgttcccgtctacttaatgaacgctctccaatagcgcgcgttgaagagccggaactaacggaataagtaacgattaatacattagaaagatgaaaaaatacatcgcaatcctgatcctcatcctattctgccaagcaggatatagccagagcatggacaaactgttcaacgactttgccaagcaaaaaaacgtaacccacgtaacggtcggcccgttcctgatgaaaataagcagcctgttcaccgagacgatgggtgtaaaaagcatcgaagtcctttctttcgaggaatgcggcaataccgtcaaagacgatctccgcgctgctatcaagaaactgaaagacccgaattacgaaacaatggtcaatgccaacgaagagggcaaccgcacgaaagtaatggtacgtattgacaaagacatcatccgcgaactggtaatcttgacaaccgatggaggcgacgatgccctgatccgcatcaaaggaaagatcaaaccatctgacatcgaaaaagtaataaacgaccacaaagatggatgttgagaactttaaaaggctgttccttcccctccatcccaagctcttccggattgcttatgcgctggtcgaaaacaaggccgatgccgaagatatcctgcaagatgcctactataagttgtggagtcggcggaatgaactgaccgatatccaaaatccggaagctttctgcgtgacgctggtcaagaacctctgcctcgatttccttcgctcacctcgtgctaacaggcgcgacgcagatgtcaccgaagccgtcactctttctaccgcttcttcaccggacgaagagttggaaagacaagacaaagtacagcaaatccgccacctgatcgaccgcctgccggaaaatcagcggcaagttctccggttgagagggatcgaagactgttcgatggacgagatagaacagatcaccggcctgagtgccgtcaacatacgggtgctactctcccgggcacgaaaaataatccgggaacaacttgaaaaatattatacatatgaatatggacgataaaaagatagatgaactgatcaataaagcccttcaagaggaacaagctttacccgaaggactttcccgtagactggaaaagcagatcgacacctgggcttccacggaagaaaagaagacccgttcattgacccgtagacggactttatattggttaagtggagttgccgcctccatcctgttgtgcatcagctttttacaatacaaatcgtcgtatcaagctcacgaccggctcagcgacacttacaccaatccgaaagatgccgccgccgctgccgaaaaggctttactcctactctcgcagaacctcaacaaaggcatcagccaggtggataacgccgggcaggagatagataaagtaaacaatattttaaacaaacacttaaacgattaatcttatgaaattaaagaatacattcctgatcctatttctttgttgcaccagcttgtgctttgcccaggataaactgttcgaaaaatatgccgatatggataatgttacatccgtcttcatctccaaaaaaatgttcgacatgatccctaatgtagaaagtggtggcctcaacctgatgaatctgaaagggaaaataaacaacctccaaatcgtcacttccgacaagcaggaagtccgggaccagatgcgaaaagaattcagcagccttatcagcaaatcacatgaagaactgatgcgggtcaaggacaacgatacacgcgcctctttctacatcgtccagaacggtgacctaatcaacgaaatgatcatgctggccgacacagattcagactatgtggtcatccggataacaggcaaattcaccttgcaggatatacaagatgtggcgaaaagtttttcccaaaacgataaaaaagaggtaacgatcagttacaactaaaaccggaaaagtataaatatcccgaaaagataattatgcttttgtgaataccttagttctggtagaactaaggctattcttgtctgttgtttgctaccgtgacaaaattagctatataaaactactagatgttttcaaaaatgatattaaaattagtcaaattgatattctttcaaaaaagatattctcctttttcccttccagaagactccaataacctccacagataagccaaaaccgataatcgagcctacttttttacaactatccgtactgtatagttcatagttctaccagaacaaattcaattgcaatcttaaatcattagcctatggagagaagtaaataacacacctaaaaagtttttgtagagaaaattagagtatttcaactgttaaattaaattttaatattatgatcaaatcgatatacagcaacttattgcctaaagctgtactattatcagtatttttaagccccggatatgtgatttcaaaagctcatgcaaacacagattccatcagtggtatagaacaaacgaacggtaaactgtccggacgggttatcgatgcaaaaggagaacctataccaggtgcaaacatttccgtcaaaggcaccaccatcggtaccattacagacatggacggtaatttttccattgatgttaaccccaatcaaatactcaccatcagttttatcggatatgaaacaaaaacaatccctgtctccaaccagaaaacattaaatgtcgttctgcaagaaactgtaaaccaactggacgaacttgttgtcgttagctacggtacacagaaaaaaagggatttgaccggatctgtttccaagatagatgcaggagaattagaaagttttcctgtaggacaatttgcccaaaaacttcaaggacaggtagcaggtgtacaaattaaccaatctacaggacagccgggtaaaggtatgggattccgtatccgtggtgcagcatctatcaatggtggtagttcacctttattcgtggtcgatggaatccctatcaatatggacctaagcagtatcaatccggatgaaatcgaaaccttttccatcttgaaagatgccgctgccacttctttgtatggatcacgtgccgccaacggtgtcgtactgatcacaacgaaaagaggaaaacaaggtaaaactcaagtggatgtgaatgcttcattcggtattcagactttaaagggactaaagactccggatgttatgaacggggaagaatttgcccaatacaaaaaagaatactacgaagatgctgccagatatgaaggttataccggaggagttccagaacaatatcaaaatccatcccaatacggtactggtaccaattggtatgacttactgacacgcaatgccgccacacagaattacagtatcagtatgacagccaataaagacaagttcaatacagctatcgtattaggctacttccgccaagacggtgttatgtacaattctaatttcgaacgttactctttacgtgcaaacaatgattatcaagtaaacgaccgcttaaaattaggactgaacatagctcccaccttgcaaatcaaaaacaaccaaaatacagacggaggttggcagatattaagtgctgcgttcttggctgacccaactgtaaatccttacgatgaaaatggagaacctattctttctctaaactctccagggatgttccctcaacctaactggatacgtgttttacatgaaaaaacaagtaaaacacaggatttggccttattaagcaatgcttttgcagaactggatatatggaacggtatcaaatataaattccaggctggtttcgatttaggtgccaagaactatagagattttacaccttcgacagccggtggagccatgtttactgctccccctcaaaaagcaagtggacaatacaacaccaacttccactatagttggactatcgaaaatatgttgatgtataaccataaattcggaaaccataatatagatgcactggtcggttatagtgcacaaaaatattccaacgaatataaccagctaacagcaactgactttccaagtgatgatattccttggatgggtgccggtgctacaaaaaacggtgacaacaacatcgagcaatgggcattagcctctgtcatcgcacgcgcgaattatagcttcaaagaccgctatttactccaggcgacattccgccgagatggttgctcccgttttggggcaggcaataaatatgcaaattttccttccatatccgccggatggattgtatctgacgaagccttcatggaaccagtaaccaatgttatgaactacctgaaaataagggccagttatggactaactggtaactacaacattggtaattaccgatatattgcgggagttagcacttataactatgtcttaggtggctctttagctccgggaaaaggattaggtaatttagggaacaatgctcttacttgggaagaaacaaagcaactggacttaggtgtcgatatcggtttcctaaacgatcgtatctatttgatgtatgactattataataaaaaagtcgatggacttttgtatcaagtcgatattccaagagcttccggcttttccaacatttattccaatatcggtgattacaaagcatggggacatgaaatcactttgcaatctcgtaatcttgtcggtgatttcaaatggactaccaacttgaatatagccttcaaccggaatgaaataaccaaaatgggaacaaacaacaccccaaaaggtggatattccaatcaggaagatttcaaccgtttagcagtaggagaacctatcggtatattcatgggatatgtatttgacggcgtatatatgaccgaagaagagtttaattcccaaccaaagcacgcctcatctgagatcggaacggtccgcatgaaagatgtcagtggtcctaacggtgttcctgacggtataatcgacaacaatgaccgtgtaaaaattggtgatccgaatccggattttatttatggtatgacaaatgaattttcctggaagaacttcgatctgagcattctgatcagtggacaagtaggtggtgacattatcaattcaaactacgaacataccttgaatatcgacggttgtttcaatgtattgaaaaaagttgccaatcgttggcgctctccggaaaatccgggtgacggacaggttccgagaacaaaagccggtaccacggaattattccgcttcaataatagcagttgggtatatgatgcttcttatttgaccataaagaatatcactctgggctatacaattccgattaaaccgagtcaatacctctctaaactccgggtatatgtaacagctcagcaattagtcacattcactaaatacccaggtatgaatccggaaatagccatgaatgaagatatgggatggaacggtttaggagtagatcgtacaacttacccggttccaagaacattcagtatcggatgtaacatttcattctgaaagaaaaacaaattataaatttaaagcgaaagatcatgaaaaagatatttagtttagttgttgcattgttgactttggtttcttgttcggaagattttctgaatctgacgcctcaatattatccgaatgatgcgacattctttaaaactcaagagcaattcactcaagcagtgaacggagcctattccgctctacggggagtatcggcaagacaaggatacctgatgggagaaatgcgttccgacaatacacattacacccgctataaagcagaccgtggtctacacatcttgtatcgtgaaaatatcgcggattttgttgtagatgaccagaaccaatggacaaatgaaatgtattatgcatgttatacgggcatttcaagagccaacaccattctgaaccgcattgaagggacgacttttcccgatgatttcaaaaataaaacgatcggagaagctaaattcatccgtgctttcatgtatttccaattggtgcaatgctacggagacgtccctttgcatctggaagaagtgacaggagcggacaacgcattcttacctcgttcatctgttaacgatatctatacagccatcgttgatgatgtgaaagatgccatagagaaacttcctacggtcaaattcccgcaaaatggtgctgcaaccaaaggagctgccaaaatgctctacgcttatgtattaatgacaaagccagatcgagattatgcaacagcggaaacgcagttaaaagatatcatgaatatgggatatgaattacttcccaattatgccgatatatatgacacatccaaaaagaacggaaaagaatcgattttcgaaatccagtatcaaatgggagatcagggacagcaaagtgattggttatactactttattcccaaaacaacgaatgcagaaattattacaggtgttccggattgtagtacgttactgacaggaggctggaatgttccgacaccggaaatgatcgcttcttacgaacctggagacctgcgtgtcgacccatctatcgctgttgcagtcggtacactggatgcagcaaacgccttagtcgtagctgatgtactaaaagtcggtgatcccaagatcaatgattatcaagttaattatccatttatcaataaataccgtcacgcacactccaaaatagaaaatacagacgataactggcctgtttaccgctatgcggactgcctgttattgttagctgaatgtctggtggagcaaggacgtgcaggagacgcagcaccctatgtcaatcaagtacgtgcgcgtgcaggtttacctgctgttacaacaatcaatgccgaggtagttgccaatgagcgacgtcacgaactcgcatttgagaaccatcgttggtatgatttattgagaacaggaaaagctattgaagtaatgactgcctacggaaaatatatcaaaacgattgatacggaacttcctgaacgtacctatcagataaagccggaatatttgctttatccgataccttataacgagttgcaattaaatgaccagctcaaacaaaatccaggttattaattatcatattaacaaaaagacctttacttttgtagtagaggtctttttactattagcaccatgaatacacaacgtattatcaaaaactttatatataccgtcgcaggaggtatcctgtctctcggaacgactggttgcagtggcaacaaagcggaaacgacagacagtttttccactttggaagcccagttttccaacccttcatccgagtaccgtacagccccttttatggtttggaacggaaaagttacagaaattgaaatcgaccgtatgctgaaagactttaaagatgcaggctgcggaggtgcgtttatccatccccgtccgggcatgatcacggaatatatgtcggacgaatggtattccctctaccgttatgccgtcgataaaggaaaagagatgggactggacatctggatttacgatgaaaactcctatcccagcggctttgccggaggacatgttcccgaagatatgtccgaatcctacaaccaaggacaaggacttgagttgacaaaaacagatcttctgcctgacaagacagacgaatatttcatcatccttaaaaaagaaggggacaaatgggcagatatcacgaacgccctgagccagcataaaaaagcaaaaggagaatattacctctacaaaaagacctatttaggcaaatcagactggtacggagggtattcttacgtagacctgctcgtacccggtgtgactgaaaagttcatcgacctcacgatgaaaggatacgaaaaaacaataaaggacgaatttggcaaatctgttttcggtatcttcacagatgagcccaacatcagcagtcccggaggcttgcgctggacaccagacttgttcgaagtattccggaaacagtggggatacgatctaaaaccactacttccccttctggacgaagagacgggcaattggaaacaggtacgtcataactatatggaaaccctgttgcaaatgtttgtcgaccgctggtccaaaccttggcaccactactgcgagacgaacaacctgaaatggaccggacactattgggaacacggttggccgcaaatgaacgacggaccggacaatatggcaatgtacgcctggcatcaggtacccgctatcgacatgctgttcaaccagttcgacgaaaccaacccgcaagcacagttcggcaatatccgtgcagtaaaagaattgcgcagtgccgccaaccaaacaggttgtaaccgtaccctcagcgaaacttatggtggtggaggttgggacgaaacttttaaagatttcaaacggttaggcgattgggagtatgcactcggggtcaacttcatgaaccaacatttagcccatatgacactaacaggagcacgcaaatacgactatccgccggtattcacctatcattctccctggtggcccgactatcgcgaactgaatgactattacggacgcctttcatttgttatgagcaaaggcatccagaaaaacgatattttggttctggaacccaactcgactttatggagctattacgtccatgcaggaagttccccgaaactcatggagataggaaccaatttccaagcttttgttacaactttggaaaagaaccaggtagaatatgacctcggttccgaaaacatcatcaaagacctcggaaaggtagaaaacgggcgtttcatcgtcggcaatgcctcctactcgactgtcgttctgcctcccatgatggagaccttaaacaagcctaccttcaacctcttgcaacaatttgtagaacaaggtggacagatcataaccttctccgctcccacccggatagacggggctgtcaatgacgaactggccggactgttgaccggtacaaccgtcacatcactcccggaactatccaaagatgtaatcgcccggtatttctcttccgataacttcaggattactttcaacagtggtaacctgtatcaccatcgtcgccggtttgcagacggagaattggtttttctcgtcaactcttctatggatgaagttgttgacggcaccctttcgacgcagggaaaagccatgttggaaatggatgctctgaacggggaaatctatacgtatccgtcttcaaaagaaaaaggcatactaagtacatctttccggatcgaaccggcaggaagcctcttgctttactgttctgacaagaaccctaaaaactatccggaacgccccggaaaagcgggaagcagcccggtgacggcaacaagccggaccaccgtcagccgtttacgcgacaatgctctgacaattgacttttgcgatgttacggttaaaggaaagacttacaagaaacaacatttctcccgtgccgccgatatcgccttcaaagcgcacggattcaccaacggcaatccttggaatacctccgtacaatacaaacggaatatcctcgaccgcgaccactttaaggatggcggcttcacggcctcctatcattttacggtaaacgatgctttcgactattccggtatcaaactggtttccgaacgccccgaactatttaccgtaaaaatcaacggaaatctcgtgaacgctcttccaggtgaatggtggctggaccgttctttcggcgtttatccgataggcggacaggtgaaaaaaggtagcaatacggtagaactcagcatcaacccgatgcgtatttttgcagagatagaaccggtctacatcatcggaaacttctcggtcgtacccgaacaagagggatggagcatcggtgcaccacaggaatcgttcacactgggtagctggaaagaacaaaagcaaccgttctactcatgggatatgagctatagcaaagaatataccctcgatgaccttacaggcagatatgccgtcaaactgaacaaatggaacgggacggtagcagaagtatacgtcaacggacagaaagccggtatgatcgccttcgacccctggcaactggatgtaacatcctacctgaaagaaggcagcaacacgatcgatgtacatgtgatcggcagtttgaagaacctgttaggcccgcattaccggaatccggctcccggcctggcatctccctggcattggaaaaacgtagacaaaccaatatccggaaaagaataccagatgatggattacgggctgatggaagattttgaattaattcattaaacatacacgaaaagagggtgcgtgcttttccggaaaagcatggcacctttttcaaaaaaggacggcagcatgaaaaatagacttttaaacatttgtatcttatgtatggtttttcctttctttctacaggcagcggacacacattccgtttataacctgcgatgcgaacaggaagaaaacccgttaggaatcgaaacaggacaaccttgtttcagctggcagatacaggcacaacaacggaacttcgaacaatcggcctggcagatattagtggccgattctccggaaaaactacaggccggcaatggaaatatctgggacagcggaaaaacgctttcttccgcctcgatccttgttcctttcaaaggaaaagaattgaaagcaggacagacctactactggaaagtaaggagttgggataaggaggacagcccttcccgctggagctgtatccataccttcggcatggggcttctttcggaaaaagactggagcaatgccaaatggattgcactggaaaaagacaggaaagacgaaatcgtcacgatagggctgcacggactggccaacgtggaccgggaactcaaaggcaaaaagatcggtatgtaccgcctcccccaattccgaaaagaatttacggttcaaaaaccggtaaaacgagcgaccgcctatgtctccggactcggacatttcgatatgttcctgaatggagagaaggtgggtaacaactttctcgatccgggatggacaaaatatgataaatgtgcgctgtatgtcactttcgatctgtccggacagctaaagcaaggcggaaacgcaataggcgtcatgttgggaaacggctttttcaatatcccgcgggaacgttatttcaaactgcttgcttcatatggcgctccgcgcctcttgatgaaaatacaaatcgaatatgcagacggcagtacgcaggacatcgtaaccggtacagactggaaaacaaccgaaagccccgttacctacagcagtatttacggcggtgaagattacgatgccacgaaagaacagaccggatggatgcaacccggtttcgacgaccgtacctggaacaaagccctcgacacaggctggaaaacccggctcctctcccaacgctccgcaccgctgaccgtacgtgaccgaatccccaccgtccgtcttttcaagacccggaaaggacaatgggtgtacgatttgggacaaaacttttccggcatcatacggctttccctgcattcaaaggacacgcacccggttaagctctatccggccgaactgctgaatccggacagtaccgtaaaccaaagcgcgtccggcgctcctttctggttcggttacacaccgaaaggaaaaggtattgaaagttggcaaccccagtttacctactacggttttcgttacgtgcaggtcgaaggtgctgttcccgccggacaacccaatccggacggactacctgaaataacggaaatcaccggtcttcatacttgctattcggccgaagatgtcggcagtttccattgttccaaaccgttgttcaatcagacatacgaactgatcgactgggcgatccgcagcaatatggcaagcgtgctaaccgactgcccgcatcgtgagaagttgggttggctagaagaagcgcacctgatgcaatactccgtacaataccgctacaacctggcacgcctgtacgaaaagacattcaacgatatgcgctccacacaagcagccaacggcatgataccgaccattgctcccgaactagtcgaattcgaaggaggcttcaaggatacgccggaatggggaagcacatttgtcatcagcccttggtacatctaccaatggtatggcgatacgcgcccgatcgaaacctattatccggatatgcaacgctacatcgactacctttcctcgaaagccgataaccatattatcgcctacggcttgggagactggttcgacatcggtccggaaagtccgggagaatcgcaactgacctccaatggcgtaacggcaacggctatctactattacgacgtcaccctgatggagaaaatggcaaaccttttagggaagccggacgatgcacgcaagtaccaggaactggcggcccggatcaaacaagccttcaaccggactttctggaacccgtccacccgtacctacgaccgcaacagccaggcggcaaacgccgtcgcactctacatgggactgacgactccggaaaacaggcagcaggtattcgataacctgatagccgatatccgcggacgcaacaacgccctgacggcaggcgacgtcggctaccgctatgtcttgcgtgcccttgaagccggtggcgcttcggatgtcatttacgacatgaactgcaagtacgacacaccgggatacggttggcaactggcacacggagctaccgctctcaccgaatcctggcaggcatacggcttcgtatcgaacaatcattttatgttgggtcatctgatggaatggttgttcagcggcttaggaggcatccgtcagaaagaagattccttcgggtttaagcatattgtcatcaaacccgaaccggtcggtgatgtccgcgacgcacaggtttcctacgaatcgccttacggacagattgtttccgactggaaagacaacgataaagaatttatcatccgagtggaagtaccggcaaacagcaaagcctccgtctatctcccgtctgccgacacgaaacaaataaccgaaagcggtgtacgattggaagatgtccccggaatcagttgcaaacaagaaggaaatcggtatgtcgtagcaacaacaggttccggtacttatactttcaaagtgaagaaaaataaataatgaagaataccatgaatacaacaaaaaaggaagttaaagtcggactgatcggagtcggattgaacacctattggaatcaattcgaagggcttctctcccgattgacggattaccaaagaatgataaaagaacgtatgtccggcttacaggcaaccgtgattgacgggggaatggtagacagcccggaaaaggcagcccggacagcagaagttttaaaaagtgaagacatagaaatcctcttcatctttatttcgacctatgccctttcctcaacgatccttccgatcgcccagcgcatcaagattccggttatcctgctcaacatacaacccgtagccgccataaattacgattatatcaacggattaggcgaccgtggaaaaatgaccggcgaatggctggctcactgccaagcctgttccactccggaatttgcctgcgtattcaaccgtgccggcatcaaatacgacatcctgaccggttacctcgaagaaccatacgtatggaacgaaatcgaaaactggatcgatgcggtaagggccgtacaagggatgcgtaacaaccggatgggtattctcggacactattattgcggtatgctggacgtttacaccgacattacccggcaatccttcactttcggcactcacatagagcttctcgaaatgtgcgaactcaaagcttaccgggatgctgtaacggaagacgaacgaacagcaaaacgtctggaattttccatgaagtttgaagtcgacccgcattgtgaagaatacgaattggatcgtgctgcccgcacctctgtcgcactcgataaactggccgaagcccacaacctcagttcaatggcctactactacgaaggttggaaaggaaacgattatgaaaatatcgtgacttccgtaatagccggcaataccctacttacaggacgcggcatcccggtagcaggcgagtgcgaagtaaagaacgtacaagccatgaagctcctttctcttttagatgccggaggttcattctctgaaccgtatgccatagacttcaatgacgatgttgttttatggggacatgacggaccggctcatttcgccattgctgagggaaaggtcagcctcgtaccgctacccgtatatcacggtaaaccgggcaaaggattgtccattcagatgcgcgtcaaacagggacctgtcacttttctttccgtatgtgaaaataatgatggcgtatttttacttatcgcagagggagaatcgaccgacggacccaccctgcacataggaaacacgaacagccgctacaggttcagttgcggagcccgcacctttatgaaccgatggagtaaggcgggtccttcacaccactgtgcaatcggtatcggacatgttgcggataaactaaaaaagatagctttcctgttagacatacctgttatccaggtttgttaaaagataagaaaaaaagagagaggctctttatctatcacgatcttttagacacggatttcacggataaattattttacttccgtgtaatccgtacttaaattatggctatcagtatgcaggattttgtttcgacatacctctcagataaataccctatgcgacataagagagaccttatcttttatggtgaggagatccccagataaacaccagtagtcgtttttatttcccagtaataatccttcgtatctcgctcagcttattcagggcttccagcggtgtcaggttgttgacgtccaggttcttgatctcatcccgcacctggctgagtaccggatcatccaattggaagaagctgagctgatagccgtctgccgatgaagcgattccttttacaggcttgcttttgatactgcctttgcgtttttccgtggcaatcccctcctgacggttttccgtttccaactgtttcaggatttcgttggaacgctttacgatgcttttcggcatacccgccatcttggccacatggataccgaaactgtgttcactgcctccgggaaccagtttgcgcaagaagatcactttgttattgacctccttcaccgaaacattgtagttcttgatacgcttgaaagaagcctccatctcgttcaactcatgataatgcgtggcaaacaatgtcttcgcacgggcattgggatgttcgtggatatattcgacaatcgcccaggcaatagaaataccgtcgtatgtgcttgtcccgcgtcccaattcgtcaaacaggacaagactgcgggaagacatgttgttgaggatatccgaagcctcgttcatctccaccatgaaagtggattctccgaccgaaatgttatccgaagctcccacacgtgtaaatatcttatccacaatcccgatacgagcgcattcggctgggacgaaacaaccgatctgcgccatcagcgtaatcagagccgtctggcgaagcaaagcggacttaccggccatgttcggtccggtgataatgataatctgctgcttttcatcgtccagatagacatcattggcaatataaggttcgccgataggcaattgtttttcaatcaccggatggcggccagccttaatatcgatcacctgcgaatcattcacatccggacggatataacggttgctttcagctaccttggcaaatgagagcagacagtccagacgaccgatcaggttcgcattcatctggataggcggaatatactcggaaagacaaagcaccagttcgttaaagagacgagcttccaacgaaagtatcttctcttccgctcccaatatcttctcttcgtattctttcagttcttcggtaatataacgttcggcattcaccaaagtctgtttgcgtatccatccggcagggactttgtctttataggcgttacgcacttcgatataatacccgaaaacattgttgaaaccgattttaaggctcgatatacccgtctgttctatttcccgctgttgtaccttcaagagataatctttacccgaataagcgattgcacgcaactcgtcgagctcggcgttcacgcctgtcgcaatcacgccgccccggttcagcaaggaaggcggatcgttgttgatctctttttctatccggtcacggatcagggcacaggcattcaactgttcgccgatacggcaaaggctcggctcatcgcttgccgtacaagcctccttgatcggctcgatggcacgaagggcgactttcaactgtaccacttcgcggggagagacgcgaccgaccgctactttggaaataatacgttccaagtcgccgatctgttccagtttctcttccagcagctccttcacttcgggatggcggaagaaatattccactacgtcctgacgctcatggatcggtttcacatccttcaaggggaacaagatccaacggcgcaacatacgcgaccccatcggggaaacggtcctatccagcacatccagcaaactcgtcccctcctcgttcatcgtgctgaccagttccaagctgcgcaccgtaaacttatcgaggcgcacatagcgatcttcttcaatacgggaaagagaggtgatatgcgaaatatgggtgtgttgcgtctgatccagataatacaggatggcccccgaagctacgactcccaatttcaaatgctggacaccgaaacctttcaggttcttcgtttcgaaatgtttcagaagacggtcgttggcagcttccgaagtaaacacccagtcatccagttcaaaaataaagaaccgaggaccgaaagcctcttcaaaacgtttacggctaccccgttcgaccaatacttctttcggtgaaaaattattcagcagtttatccacataatcaacggttccttcggctgtcaggaactcgccggtagagatatcgagaaatgcaattccacagacatccttaccaaaatgaatggcagcaaggaagttgttttccttatggttgagtatattgtcattgatagaaacacccggagttaccaattcggtgataccgcgtttcactaatttctttgtgagtttcggatcttccagctggtcgcagatagctacgcgcttaccggcacgcaccagcttgggcagatagctgtccaatgcatggtgagggaaaccggccatctcgatcgtttgccccggtccgttcgcttttttcgtctgtacgatacccagtatttcggctccggtcacagcgtcttcgccatacatttcgtaaaagtcgcctacacggaataacaggattgcatcaggatgttttgcctttatatcgaaatactgcttcattaaaggtgtttccactatctttgccactgttcttttctttttatctgttcgactgtacaaaggtacgatttttcatctgtcaaaaaattcacggattgctttttcatttattccttagaaaaaatataactttgtaagcatcctaacaaaaaacatatatcatgaaacaggcaattctaatttcgaccggccttttgctgacaactcctttcattcacgcagagaagaataaggacaagaaaccgaatgtcgtttttatccttgcagacgatttgggttatggcgatctaagttgttacggacaagaaaagttcgagacgcccaacatcgataagctggcacaaagcggaatgcgctttacgcagtgttattcggggacaactgtcagtgccccttcccgctcttgtctgctgacaggcacgcacagcggacatacccctgtacgtggcaacttcgaactcgatccggaagggcagtttccgcttcccgacgatgcccgcaccatcttcgaagtaatgaaagatgcaggatataagacatccgctttcggcaaatggggactgggctatatcggttcaaccggcgatcctaaaaatcaaggttgcgatactttctacggatacaattgccaattgctggcacacagttattaccctgaccacctctgggacaacgacaaacgagtggaactcgaagacaacaacctgaatgtacagtacggaaaagggacttactctcaagatcttattcatggaaaggcactagaatatctggacaatatgaatccggacgaaccgttcttcatgtggtatccgaccatcattccgcatgcggagctgatcgttccggaagacagcatcatacagaaatttcgcggtatgtacccggaaaagccttacaaaggaaccgaaccgggcagcccggctttccgcaagggaggttactgttcgcagttccatccacatgcaactttcgccgctatggtctaccgtctggacgtctatgtcgggcagatcatccaaaagttaaaagacaaaggtttatatgataacaccatcatcatctttgcgagcgataacggccctcatatggaagggggcgccgatcccgatttcttcaacagcaacggcatttatcgcggatataaacgggatctgtacgaaggcggcatccgtgtcccgatgatcatttcctggccgggacatgtccaaccgaatacggaaaccgactttatgtgctctttctgggatgtattaccgaccttcgaagaaatcatccatccgaaagccaaacagaaggaaatggacggcgtcagcatgcttcccctcctggaaaaccggaaaggacagaaggaacatgaattcctgtatttcgaattccaggaactgaacggtcgccaagccgtacgcaaaggaccgtggaaattggtccacatgaatatccgtggcgacaagccctattatgaactgtataacttggcgtccgacccgtcggaacggcacaatatattggaccagtatcctgaaaaagtagcagaactgaaagatatcatggtccgtgaacacagaccggacccgaactggccgctattgaaagaggaaaaggcgaaataatagggaaaatttatagaaaaggatgtcaaaatccaagacaaccgcatcaaaattttccaaggttgtgatctacatacgaagttttctgcaaatcttctatcactctatcactacaaaagtttcagatattgatattcaagcgttatagcagtgatacaggatgttttcctgtatcactgcctctatcactcctgaaacaggacatttttatcatatgattggaaaccaacatattgccttctattacttttgaaaaagcatataaaataatcgaataaacaaatgtaaaaacgaatataataggtattaaattgacaaaatacggttcttcattccacaaaagccctctctttttttagcagaaacaagcagataattccgtaaacacccccatgttgccatcctttacatccgggtgtagagagtcggtacatccgggtgtaaaagggggtaacatgggggtgtccggcaactaaagtgccttgccggacaataaaaaccacccggtttcacctattttatagccgtttttacacaaaataatcgagtggtttgcagggatgggaatcaagtgtttattgtttgttttatttgtaatatactaatatacagatatgtataagcggaatacctgtttcccatccaagttgccagtgatagggttgtgataccgtagtgatagagaaaacgggcatatatcactaatcaaacaagttgaatatcaattggtaaaaagaaatcagtgatacagtgacagaggaaatgggaaaaacttggttcttcgtcaatttcggagcagttcaagtgttcaagctaataagtttattgactagcaaagtaatgtttgccctgttgaacatttgtcttttgatagctttagttttattgactgtcctttccatactccattgttcagatagatatccattgcattttggacagcctccttgtctctccttatgcctgcggcaaattctcttaagatcttcagatcactttttcaaatcatgtatcgcctttacagaggcgtggtttttattttttctaccagccacacttctgttgtattcccttattttccattgtccctctttgatgtcattactgatttcttgagtcgcacgctctacgtcacgatcgtccattatccccttcctcatacagtcctctgcatcaatgaaccgtctcagtctgcgccggtgcctttcgtcccccatattataaaaggactccatcatgacggacattggcacgtctcaggcaagaggactggctgcagacgatgttttgttcatgcagcagattaccggcgatacgggaagtggtcttcaaggatatgctccggatgcgttcctccactttccgggtatttcgcgcgtgcgaagaagccagcgggggagaggggttcgctgaagacttttctttgacacgcgatatttctgcagcggaacttacgcacattgaccataagcgtaagcggatgccccgctatttcaagcccttgcagggaacatagataatggcccttcacatgattactaaactgaccgcagaccggacagcggactccttaatgcgtaccggacaatgttacataataaaatatgtatggattgtgaactgttccgttatttaaactattgatttgtaaattttatcaatttgggaattgagtttcctgactatctctctcaaattctattctggatactgaattccgaaatggtcaatagggaatgtatgcatgaaaaggcaaaaacaatttattttgtaatatgcacactgaatatacaataggcatttctcttccaatcttatttttcatgtgggataatttaaaagaggtattatgttcattgtctatgcccttgcttatttgagtgatatagaattatgttatgtgcagattagaattaaaatgtctgagagaatatataatattagaaagtggtattgtttttaacgagcaaagttaaagtcaagaatcatagttctatgggaactatgtctttatggatatttcatgtctgggtcaaagatatgattttttttatttcgttacacgtttttacgagaaaaatcacattgatcttatttttaacagttgaattgtaaaattcttagcgattattggataatactatcagcgataatcaggctataagcctgattatcgctatgtcgattgcaaaagttttaaatttatcacaggtcatattttacaaaatgccatagttcccttagtactatggtagcatgatttatgcagcaaaacaaagtaaaatattccacactgaaaaacggatttgttaaaatccgtttaggtgtcagtgcgcgcataattgatcaagttacctattacgcgcgcacaagtacatacaaccccctataatccccctttaaaagggggtaaagtattgatttataacgttaacactttttatattatatttattctatttataagcgcataaataggtctactccattgagggcgatctcgttcgggtacctcagggtatcacgtcgctacgctttgttctaccctattggtaccgtctctcgatcgcaggcaactatcgttgccgatttccattgtcgctatgatcgttgttatagacgccttcggcagataggtatcgcttcgcgatcgattgaaaaacgtgaatttttcacgtaaaggttttggttaaattgggtcgcgagaaagaccatgccaagacgacgtccgctttcgcgagttgtcgcgatcagcgcaggtgcaagtacaaacgcctaaacccggctggggataccagtcgggtagaggacaaggacagtttaggacaaattactcagcagggtcgggagcagggtcgggagcagggtcgggagtcttttccttttccaacttttccttgtacgccttttccatatcgattttacgttgacgttcacgttcggcaagaccattccttaatgcggcataatcagccaaatcaaaatcagggtcctctgtaggcaatacatcatcaaaatcctgatcagtatctggataatctccagaccggagaccagaggaaacaggcatacccattgcgaggcggtaaataagctctcgaacggtgaagctctcggaaggttctaccaaaatctcatcacttactttttcttgaaccacttccgaagaaacattgctaaaattataagcggtaacaaacataacaatccaaagattaaaaaaaacaacaatacaaaccaaaacttgaacataccttaaagcattggagtgccgtatttaggcatcaaacgaagtgctttaacatcctggtacatttgtacccaaaacttatcgtcttcggtctctgacgtagcaaaaacacggttactcggtttacactcaacaaatgtagtatttaagttcggcttatcctcaaaaatacgattcaaatgccaatatgaaagattaccacggaaatcgccatgagcttccgattggtgatatttatattcagaataacgcggggcatatccaaaagtaccgccgttataattactatcagaagacaaaaataactcttgattcttaacctcttgttctgacaaatgagcaaattcgggaaaataaaagtccatattatcgaacttcgtgaaatcacgcggaacgccttgctggtagcctgtacgcggagtgatcgacatgataccgataatgtatccgtgttcctcgaaataatgcttgaaaccattattgattccggcagaaataccatgtccggccatatttgcctgtggtgacgtttcgtcagtcgaggacgtttgcaatacttccgatactgaaataggcatacgaccaccgccgaggaactgaggacgttgaaggcgggcatctgatgaacgaacaccaaagtgtgacaaaatttgctcaatatagcgagaaccaccacgagcgttacgttcaaaccaacgctgcaaagcattcgaagtacggagatcgttgatattgatgcccatttcatcaacattgacttttaatgtaccgttcggatcaagttcgggagcgcggttacctgtaccaccgttaacgccgaccaaacgagataaacgcggattaccttccatagaaaacacagcatcataagctacaccattttcaaaagatcggagatcagaatcaagccaacgttgagtagtcttggcatctctatcatacttaacatctaaagtgtcaccagacccttggataggcacagtaacttcggggccacgttgcaaccacggaagagcagaagtaaaatagtccttttcccaagcacgacggcgaagctgcaaaagattcaacgcatgcagcgtatcctcaaaaccggaaagcagcgaaatatcgacaggttcagttaaattctgatcacgataatattcattatagattaactgataggcacggaaaggaagtgacgaaacacgataattttggggagcagtcacaccattagggctaggattcgggaactcagcaccgccaatgccttttaatgaaggcaagccgagataatcccaaagcgtaccatcaccaaaaaatgccgacggatttgacgaaaccaaatcgggggataaccggagagacggaagaacaggaacgtcgtcgccgtcaacacctttagttataaaatcttcccactcgttccatacaagacgattcgggacaaagaaatagtgagtgaaaacatttacacggtgcatcataggagccacaaggggagccaagcgcacgagagattcggttttcacacggaacttatcgccaggaacaacaggcatacacataataggtacaagttcgcccatgttcaacgtcaactttgattcatatgataagttgaaagcattccgacgaggacgtttcattcttatcgagttaaatatatttgtcattacattttacatcttaaacgttcattcattcttttttcatactcttcgcgttgttcaagctgcatgagatcagtaagaataggattttcacgagcacaataatcaatccactcattgaacattttatgtcggaaaaactcttcacgcatttcctttaaaaaggctttcatatcatcatcatagagcttatcagcataataacgaggcatagccattttatgaccggcccaagcacgaacataatcacgaggatgtctacgataaaactcaatgatatcagctttcatgaatccaaagccaataccaggatttcgggaacaaagcataaacggcttgtacttcttttcgtctcggagaatctcgggacacatacttttttcgtacatgtatttacagacataagcgatctctttaatcgtcaaagggtgagcctgtacaaaaccgttctgccaacattcggccagtaagtcaccagccattttaccagtaaaagggaagccaaataagatcatatgatagtgagggcggccattttttgcaccatattcagaagtgacaaaataacgcattttataatcctcatatttctttcgaagccgtttcataaataattgcacatcgcgcttagatactacggcaacatttgtttgaaataggtcactaccaattcgtactatcggcaaatgctcatcatcataagtaagagtaacgaacaacgatagcggatattctttggcttccgcttgtaagcgatatacccaagattggcgcttattctggcgacagtttacacaccaaccgcaaggaactttcgcttctacactggcaagatacatcgggtgaaggcatttagccattcaacgcaggggtatcgggtttgtcaaagatcgactttacagcatcaatgaccgtttctaaaacggcaatgataattttccaaactggtttcataagcgaacacctcctctacttacacgataaccacggattctacgtcttctactacggccgaggaatccacgtctacggcctctacgtctacgtctcataacaaaaaatttatttggggttaaacaaacggtcaaaagagccatcacctttgaaggcatcaagaccatacataaataaacgacctaacaaatcacggatagcaccagcagtaccggaactattaccgaaagccttttctagggtataacgaaactcattaatatcattatcctgtcgaagtttacgaagtgattgcatagcaatagaatattccgcactcgagagcttaactttattatcaaacagagcacgatctaattcatattggagcaccttttgattcgcactagtccaagcgccagcagcgcttgcttcggaaagatttttctcggctatagcacgaccaatagatacgtcacgaagctcgcgagcaaggttaagatcaaacccggaacgtgcagtagacatagcaatattgccttgacgaataccttcagttcgagcttgttctttaatgagcttattttgagcttccatgttttcaacttgagctttattttgacgcattgccatatacatagacgcagcatcagataaaccaagattccaaccgcggtagggttccattgtagcacgttggattttcgcaggttgatattgcggagctgaaccagcgctattaccagtaacaccactaccataagccaaattaggattaaggccagcttgccgaagacgggacatttgcgcagtcggtgaattgtaccgattctgcatattccacatctcaacactgcgggcataagccttttcgttctcggcagtttgccagttattctggtatttagccaactgcatattccgaatattagcattgcgttgtgcagccatgccgaaaccagaattaagcaaagaaccaaaaccagcaataaggccaccgcctattaaaggatccatactaaccaattttaagtgactctaaataatacgcattgatctcctttacggtatgatcacaaacgagaagagctaccaattttctaccagcattatgtgcttgtataatatcacgggcagagaattgtgtactacgaaagcgttcaacgccttctacatcagtaaattgtacatgaaaataaaaccgtctcattgtccttttaatttaaggctaccatagttcccataggactatggttgattgttggtattccgacaagttattctaaagagtgatgttattgtaatgcagatataaatctaataattcaaatttatgaacaacgctttactgaaagacaatcttgctgcaagagcagtggattctcagacgcggaaggtgttttcaaggtccggtcttatagctggattatgtttatcttccctcgtttcttcgtatgctattccaggtggagtggatgcaacgaaagcaaagaatgaaagtgttatgatcactcaacaggctaaaagggtgtcgggggttgtaacggatagtgccggagaacctatacctggtgctaatgtcgtgcagaaagaaaccacaaatggtacagttaccgatatgaacggtaagtataccttggatgtacctaacaatgcaactttggttatttcttttattggttatactacgaaagaaattaaagtaggtagccagtctgtgttgaatgtcagtttagtagaagaggcaatcggtctgaatgaggtggttgccattggttatggttatgtaaagaagaaagacctgaccggtgctgtttcgactgtatcggcagatgacatggtgctgggtggtacggtgagtaacgcagcccaggcattgcaaggtaaaacggccggtgtgcaggtatcgcaaagttcaaaagcaccgggtggtactattgcggtacgtgtccgtggcaataactcaatctcgtctactaacgaaccactttatgtagtggatggtttcccttcttctgaaggcttgaatctgaatccgaatgatattgaatccatgcaaatcttaaaggatgcgtcggccacggctatttatggagcacgtggtgcgaatggggtcgtattgattacgacgaaacgaggaaaagcaggcgaaaacaagatttcttacagtggttacttgggaactcagaaggtggataatccgtttgagtttctcaatgcaaaggattatatgaacttgcaaaatgcattgtatcaggaaattgatggccaagaaggcaaccctaacggagtttatacgccctctcaattacagtctaccgtagataccgattggttggatgtttgtacacgcctagctttggtacaagatcataatatccagttccgtggaggttctgaaaagacaaaggtattgaccagtttaggatattataagcaagagggtgttttgaagaatacggattttaaccgtatttcaggacgtgtgaatgtagatcaaaccattaacgatttcattaaagccggtgctacgatgtatgcccaccgcgaacgttcgaatgctcaaacctatagcggaaatattttgggtgagaacgtcatgttgagcgtgatggagtatgatcctacggtaaaaccttataatgaagatggtacgtatggacgtgttccaggtggtcgtggggataatccattggccaatttgctggaacgtaaaaaagaaatggtaaatgacaagttcaacggaacagctttccttgaagtcaatccatttgatggatttacggctaaggctacagccggtgtcgaattgttgcataatttcaaaggttcttatttgccgaaatctactacttatgcaggagaaatagaagggggtattgcttctacgtatgatttcaggtcaactcgacaggtgtttgaaggtattttaaattatatgaaaactttcaacaatatacacgacttgaatgtaatgttggggtattcgtatgagaagtacagtgcggagtctcgttcggcaaacggaaaaggtttctctaccgacttgtttgaatggaacaatttgggggcagcttcgattaaaggagtctcttcttctaagacagagaatttgttggcctcattctttggtcgtgtaaattatacgttcaatgataagtatttggcaacggtaacagttcgtcgagatggttcttctcggtttggagctaacaatcattggggaacatttccttcaggatctttggcatggcgtgccagcgaagaagattttgtgaagaattggggtgttttcagcaacttgaaagtacgtgccggctatggtgttactgggaacgaacgtattggcgattatgcatcgtatgcgttggtttctaccaatcatgtcactttagatggttcaaacaatatgccgggtacgcatcttaaccaaagcagtcctgaaaatgccagtttgaagtgggaaacgacaactcagtataatgtcggtttcgatatgggcttttttaacaatcgtttgtctgttactttagatggttactggaaaaaaacaaaagatttgttactgaaagtttccttaccttattataccggttttacttccggtcagcagaatgttggtgagatatcgaatcgcggttttgaattggatattacttctcataatttgactggtgatttcgtttgggatacaaagtttaatttagcactcaaccggaataaggtattagacttaggaagtagtggtgacatacgtatcacttcttcaaaaccgatgggaactgtatcggaaaatgattatgctatcgtacgtgaaggagaacctctgggctctttgtatggatggaagtatataggtgtattgcaagaaggtgaatcgtatgctgctcaaccgaattcaaaaccaggtgatccgaaattcgaggatgtgaataatgatggtaaaatcgatgcagatgaccgtacaattataggcaatgccaatcctgatttgatttttggtttgaccaataactttgcctggaaaggatttgacttgtcaattttcttccagggatctattggcaatgatctgttaaacatgacacgtatgaatttggagtggaaacgtactacagacgcattgaatcgttggacaccttcaaacaaaaatacagatatcccgcgtaacggtttctactattcgcagtatggcggatatgtgaacgaccattttatcgaagatgcttcattccttcgtttgaagaatttgacattgggttatacgattccgtttaaaaagatagtaagttcttgccgggtttatttctcagccgagaacttgtttacaatcacaggttattccggttgggatccggaagtggatacaaaagctaacgaggctgcccagtcaggtggaagccaacaaacggcaaatgctggtgcaggtatggatttcaatgcttatcctgctatgcgtacttatacggtaggtttgaatattacgttctaatggaaaggagaatttgaaaatgaattgtaagaaatatttattaggtctggttacgatggggttggttacggcttgtaccgatctggatcctgaaatatatagtaatttgacgacaacgaatgcttatagtacggagtcggatattgaagcagccgtcgtgggtttatattcggatatgaatccttatccgggagatgcttggttatattacggggggtatatgattatgattaccgattatgctaccgatataggttattctacagcggctggcgacccgactaaactgagtaatatgacgtatgatgccagcaaccgctatttcagtaacaactggagggatatgtataatgtggtatcgaatgccaatacgattttagataatgtggatgctgtcaatatgtcggaagaaaagaagaatctggtgaaggggcaggctaaatttttgcgtgcaatggcttatcgtgatttgacagatgcatggggagcagttccttttatcacttcgttggtgaagaatccttttacaatgaatgatgcgacattgactccggtatccgaaattgaagcgacattgatttctgatttgaaagaatgtatcaaccttttacctgctagctggagtggtcaggatttggctcgtgccacgagtggagccgccgctacgttgctgggaaagatctacttgcgtaatcatgattatgcgaatgcgaaaacatatatcgacatggtgttgaacagtggccagtatgaattggaaagtgatttcaaatatgtatggtcggaaaacaacaaatatggaaaggaaatgatttttgctttattgcatgaaacgggaaataatgctgccgagattgcctgtcactttggtccttcggatcatccggaagtaccggggcgttggcaatattatggcgtatcccttccgttttggcgtagttatgacaaagaagatccacgccgtgagttcttttattatgattatacgggagatgcaaaacgggatgatcaatctgattacggtttccattacatggttccggaagagggggtaacggttgttccgaatgatacgaccaagtatatgcaaaatgtagctaccatgaaatatacgtacgacatgatttcagatgcttattatgatgggcgtacgatttgtattttccgcttgtcggatgtaatcctttgtaaggcggaaatcgagaataacttgaatggtccggctgcagctcttccttacttgaatcagattcgtgctcgtgccggtgctccggaatatggaaagcataatcgtttcccagctccttcaacaaaagaagcaatgaatgatgctattcttaaagaacgtggttatgaacttgtgtttgaattccagcgtcgtgcagacttgattcgttttggaaaatatgaggaagtcgtaaatgcgcatttaaagaagctgggtatcgctcagccgacaaatgtaacttctagtttgcggtatttcccgtatccgttgaatgatgctcaattgaatccgaatttggcagcagagaatccttcacggttgccgaaataaataatctttaaggggggggctgtgttccttaattccgacttttgacatgccccccttacatttaattaatacataagatcgatatgaagcgtttgataggaattgttgttgccatctgtttgttgtcagctatttttatatggattgaaaagaatacattgagatcgataactctgacttcacctcgtaatacagccatgtataataaggtagatgtttcaatagccaagccagctcctgtatatattgaatatacggaaaaaaagaccgggaagtcttatcggacccgaacttctccggcggatacgcttcatcatttggatttgttacttttgaaggctaataccgaatatacttatcgagtggttatcgataacctttttaagcaaaaatcaaaagaactgacttttaaaactcgtgagcagtcttcttggttggtcaatcattggtttaatgaactacatccgcatgacacaacggctttgggggatgggatgatattaatttgttttggtcgtttgcctggctacatggcattgattgacaatgagggtgaagtacgttgggtttggcaggtggatgatattggagtacgtgcagcttctattacgccgagaggtacattcctggcaatgctgcgtccgtttgtgaaggacgtaatagatgattatacgatgactccggagcaagtacgcaacgatgaacataaaaaaccgatgcgtcgaggttcgattgggtttgccggcggaaccgggctggcggaagtatctctgacgggcgaaacgatgtggcgcctagacttggataagatagaaaaggaaaaggattatcaggtgattcatcatgatgtattaatggataaagaccatcatatacatacattgtaccgtccgaagaagattgctacaatatccgtaaacggtacaatggaaacggatacgttagggggcgatggcattatggttatcgatacactggggaatgtgttaaagacatggtctgcctgggatgtatgggatatagagaatgatccgtatatcggagaataccgatacgatcgttttcatatcaatgggctttgttttgatagagacgataattatttattatcggcccctattgaagatcagatttggaaggtggatgccaaaagcggtgaactggtctggcgttttgggagggacggagactttagaatggatacaacggcttatttctctttccaacattcaccttatattatggagaatggcgatctgatgcttttcgataatggtttacataatcaacgttccggaggtaaggctttccggttggatgaagagaaccgtacggcccaaataacaatcaatgctttattacctgccgataaatatacttcgcggatgggcaatgcctctattttgccgaatgggaacttactgcaatgtagctcaaagaccggttcggtgatggttacggataaggaaggaaaggttctttgggaaagtgtcctgcattttgctccttatcgggcagtgtatgttccgatagaaacctgggataaatattttaaagaaatcaagtaatatggaacgtgcatcgctatcctatatcttctttacattcctgaaattgggagctacggcatttggcggttatatgtcgctagtggctatcgtacagaagcagttagtggaagtagacaagaaactgaaagaagaagatctgctggatggaatttccctgacctccgtactgccaggacccgtagccgtaaatacgattgcctatgtcgggtaccatttaagggggataccgggggcggttgtgacttttgccggaatcattattccctcgttcttactggttatatttctttcgtggttgtatttctcctacggaaatatacctgcggtaaagaatgtgttcagcggaatcactccggctattactgctttgatcgttacggtggctatcgggatgacacgtaagacgatcaaattacctgcccaatgggttctttgcctgctggcggctttgttgctgatttttatcggtggttttacggttacttttctgttgattatcggtagcgggatagtcggcggtttcttgtttcgccagtctgtgggacaagagttgatatcagatggggagaagcggacgggtagcaggcagctgatgacttccgggattgttcttttgctattactctgtatcttactttggggaggacaatatccgggtgctccagaaggtattcagattgtatcgaccttctccggtatcagcctgactttgttcggaggaggatatgttgttattccggctttgcatgagttgttcgtggagaacttgaactggctgacctcggctgagtttgccgacgggatagcgatagggcagatcactcccggaccgatatttattacagcgaccttcatcgggtataaagtggcaggtatcacgggggcgttgctggcaacgttggcgatgttcactccgccggctgtattaactgtcttattatcccgttttgtaaaaatactgaatcagtcatccgttgtaaaagcagccatgaaaggggtacgggcggctgttatcggaatgatctttgcttcagccgttacgatcggacagacgattatgctgtcggttgtttcggttattatcttcctggttacattttttatttcactaaaatacacaatcagtccggtttacctgatcatcggagcaggcgtggcgggctttatcttattctaattctatgaatacaatacaaggtatacaaatgattggaacccagcgatccggatccaatctgttgcgtgtcatgctagatggaatccgggagatcgctgctccccatcctccgcatattcttcagcgtttcttgccattgcttcccaaatatggcgatttgacggatcagtctaatttttatcggttggcacaggatgtgtgcgagttagtcacagtgaatccggttccctgggaaggtattacgattcgtgcagatgaagtggtagcagcctgcaggcaacaaacgttgtatgagttgttccgggtgatttatgaatcagcagcccgtcagaccggagcttctttctggttatgtaaaagcatgaaaaatatgctgtatgcagaaggcattgaatctaccgggatttctccttattatatctatctataccgggacggtcgtgatgtcgctctttcgtttaaaaaggctattgtcggagagaaacatatttatgcactggctgaaaattggaaaaaggatcaggaagctgctctccgtttgaaggacaggacggcggccgatcatttctttatgctgaattacgaaacacttattgccagtccggaaaaagtgatgcggcagctttgcaatttcctgcatcttccttattctgatagggtgatggattattataagagccgcgagtctgaaaatacagcggttgcaggcaaaatgtgggcaaatgtaaccaaaccgatcctgaaagacaatacaaaaaagtttctgcgtgaattatcttccgaagatattgctatctttgaatccgtagccggagatctattgcagcaactggggtattccttatatactccccttgatctgttaaaaggcagtttctctgacgaggaaatagtgttttttaatgaggaaaacatacgtttgaagaatgtctttatccagcaggctgatccggccgatctggcgaaaagacgtccgcaggatgaattgatcaatcgtataaagcaatattaaagataaatactagtacacatgaaacaattgctatttacacttttttgcctgtttgcctatagtagtttgcaggcacaggctgtacccacagacgaactttatggggtaggtatatggaatgccgattcattgggaaaccatcgggtaattgtctctgtagataaaccggccgatgctgtattggcaacgatcgactggcgtcgccgcgatctgaacccggaagcaaaaaatctgatcgttgtggatgctgcaaccggtgaacgtattacgaatgtatgccgctttactatcgaccgggagcagggagaggtggttttccagccgcagactgttccgggagaatattatatctattatctgaagaatgtaatgagcggtagtccttactatccgaccgttaattatccggctttcgagaatacggcctcggctgactgggtaaagaaaaataaactgtctgagaagaaagcacctgcccttccggcggctaaagtcgtacagttccaggcaatcaatgagttgaacagcttctatccgatggaagtgatcgctacatcgaacgagactgcccgattattaaaagaacatcccggggagaaatatattctctttacggaagaccgcaaattccccatccgtatgacaacggatattccttataaatggattgctgacaatcggcatgatttctttaacgggcaggcggataagggagagtattatgtctttcagttaggtgtttgggcggcacgttcgaatgtagagaatctgcatgtcgatttctctgcccttacgaataaagcgaccggcgagcagataccagcctcctcatttacctgtttcaatacggaagggacggatgtgaccggtaccgtctttgaaaagaattgctctgtggataagggtaaagtgcaggcattatgggttggaacccagttgccggagcatctttctgcaggtacttatcagggaacagtgactgtctctgccgccaatgccgaaagcaagaccgtacaggtctctctgaatgtttcggaaaatgtaattgccaatcatggagataatgaaccttggcgtcattcccgtctgcgttggctgaactcgcagatcggttttgatgatgaggtgattgccccttatacgccgctagtgatgaaggataaaacgatcagctgcctgggacgcgagattaaactctctgacttaggtttgccggaacatattaccagttatttcaaagagactatgacgggcatcggtacgaatggccgtagtgtattggctgctcctatggaactggctgccgatggcggtgcatgggaaaacctgaacttcgaaatcaccaaacataaacaaggtgcaatcgcctggaaagcccttaaccaaaacagccgtttcctgatggacctggaaggagagatggaatcggatggaaacatagcatataaagtgacattggtcgcccgtgaagatgcttctgtggaggatgtagcgttgcggacacatttagcatccggtgtcggacgttatatgatgggtttgggagagaaaggaggttactgtccgaatgatcttcgctggaaatgggatgtagagaaaaaccaggatgctgtttgggtgggtgatgtcaatgccggtatccagatccgcctgtatgataataaatacgaacgtccgctgaataccaatttctatcatcagaaaccgttgcacatgccggtatcctggtgtaatgccggaaatggaggtatcgatattcataatgctgccgatggaacacgtattaatgcttattccggtaagcgcagcgtgaaaaaaggagaccggctgtattattatttcaacctggcgttgactccgttccgtccgattgatacggataaacaatggcgcgaacgctatcatcataactatgagttcctggatggtatacaaaagcgaggtgccaatgtcatcaatatccatcatgcgaatgctatcaatccgttcatcaactatccgttcctgcgtaccaaagagatgaaagcgtacatcgatggtgctcacgcccgcgacatgaaggtgaaaatttacaataccgttcgtgagttgtccaacagctgtgtggaaatgtttgctttgcgtagtctggggaacgagatcttctcggaaggtcccggtggcggcttctcctggttacaggaacatttggaccagaattatatcggcgcctggtttgtacccggactgaaagatgcagcgattgtgaacagtggcatttcccgctggcataactattatctggaaggtctcgactggctgatgaagaacgtcggtatcgacgggctgtatatcgatgacctggctttcgaccggatgacgatgaaacgtatccgcaaagtgatgaaccgtacgaatccgggagctatgatcgacctgcattctgccaatcagtataacccgaaagacggttttgccaatagtgccaatctgtatctggaacatttcccctacctcgaccgtctgtggttcggtgaatacttcaattatgatttcccgccggagttctggctggttgaagtttccggtattccttatggtttgatgggcgagatgctggaaggaggcggtaatccgtggcgcggcatgctgtatggcatgacaggacgtagtcctcgtgtggataacggaccgctgtggaaactgtgggattctttcggtatgcagaatagtgaaatgatcggttactgggtgaaagacaatccggtgaagacgggtagcgaaaagacgttagcgaccatttacagccacatgggtgataaagcactgatctcattggctacctgggaagatacggatgccaaagtgaagctttccatcgactgggctaaactgggtctcgatccttcgaaagtgacattgcatgccccggctatcgagaatttccaacaggaaacaacctggaaacccggcgatgagattgttgttccgaaagggaaaggcttgttaattattgcaaaataacctcttccgatatagtataatttaccggaaatgtactctttaatcgtatataaggaggattaaactccttatatacattattgtccatataaatgaattaccatgaaaaagatgctcatccttctttgtgcaacctctttgttgcaacccttgtttgcacagcaagcgactgtaaccgagacagtagagacagttaaaacctatcctttctctgatcctgatccggtggctgatccctccgatctgttttatccttatttccgttttgatggtttttctgctaaaggaatcaaccgacaatggaaagtagtctctcttgaaaatgattatatcaaactgaccctcttccccgagataggtggaaagatctggggagccgtagataaaacgacgggtaaggagtttatctacaacaaccacgtcgtgaaattccgtgatattgcgatgcgtggtccgtggacatcaggcggtatcgagttcaacttcggtatcatcggtcatgcaccgacttccagtacgccggtcgactatgtgacccgacagaaaccggatggaagcgtgagttgttatgtatcctcctatgaactggttactcggacactgtggactgtggaggtgaatcttccgaaagataaggcttactttacgacgacaacgacctggcataacagttcatccattgaccagccttactatcaatggatgaatgccggctatccggcagcggggaatgccgagttctgctatcccggaaccaattatatcggacacggaggcgaactccattcgtttcctttggatgaacagggccgggatatcttctggtatgaaaagaacgacttcggtaattccaaatcgtatcatattgtagggaagtataacgatttctacggtgcttactggcacgacaacgatttcggctctatccatcatgcggattatgacgagaaactgggaatgaaaattttcctttggggactttcccgggagggaggtatctgggaagatttgttgacggatacgaacgggcagtatatcgaactgcaatcgggtcgcatgtataaccagccggcttccaatagtagcttaactccttataaacatacggcattcggtccgcaggcgaccgacaggtggactgagtactggtttccggtaaaaggaataaaaggagtttcaaaggcgagccgtatcggagcgcttaacgtgttgagggaagatggctttctgaagttatatttctctcctttgcagaaattatctacaaccataaaactctatgaaggagaaaaggaaatgaactccatcccgttgaactgcggtgtactgggaacctggaaagattctatcccattgaataaggctgttgccgccggtcgactgaaagtcgtcgtaggcgaagacttgttggtgtattcggaagtaccttcggataacatcaccagtcgcccgaaacaactgcctgccgattttgactggagttcggcatatggtctttatacgcagggagagcaatggatgaatcagaaagtactcgacaaggcagaaaagtttttactggcttccctcgaaaaagatccttatttcgtgcctgcactgactgatctggcttccctctattatcgtcagggacgttatgacgaagcgcttgcccgttgtaaaacagcgttaagcattaacacgtacgatggagatgtcaactatctgtatggattatgcaacatggcattgggaaatcatacggatgccaaagacggcttttctgtagcttcttattctccgagagtccgtagtgcagcctatgagaaattagctgaaatgtacctgatggataggaactgggcaaaggctgaacattatgccttgagaagtaaagagttcaatcaaatgaatctgagtgctgaccatgttttaatggtggtttatcgtaagacgaaccagccggagaaagctaaagcgcttatcgatccgttgctggaagaccttccgctgtatcatgcagcacgttttgaacagctctaccagggggaaggctccggtcatcctatcgatgatcttcagtcgttgattcgcaacgaactacctttcgaaacctatatggaactggctgaatggtatgaatcggtcggttgcacagaagaagcattgtctctcctgtcatgtgcaggtaactatccgattgctctttacaaacaggcttatttattgcatcaggctggcaacgacgatgaaagccgcggaatgttgcaacgcgccggagctctctctccggcaatggtatttcctttccgtccttcttctttaaaagcgttggaatgggcgaagacggtacagccggactggaagatcgattattatgaagctttgatccggtgggctaaccaggataaggcaaaggcgttggagctgctggagaattgtggtgaagccgactatgcaccattctatttaagccgtgcctctttaaaagagggcgaatcccggttggctgacctgttgaaagcagagcagatcgagatgtcatggcgtaccggatttgctttgatcaaccactatgtcgccaataaccagtggcagaaagctgttgagacaggaaagaagtatacgaagaagtatccgtcgaactattatattggtttgaaatatgcaaaggctttgtgtgagacaggccagtatcaaccttgtatctctctgttgagccggatgcaggttcttccgaatgaaggttcgtatgcaggacgcgctgtttatcgcgaggctaatttgtaccgggcaatggaacaactgagccataagaattataaacaggtagtgaagagtgtggagacatcaaaagaatggccggagaatttgggtgtcggaaaaccatacgacaatatgattgacaaccgtctggaggattatctggaagcaaaagcagcggcagggcagggagatagccgaaaaacatctgctttattagctgccgtagccgactatacgatatcccgttctcattttgagtctggtaatctgttaagtgcattggctttgcgcgagtcaggaaaagtgcaggaagcagatcatatggtagctgcctggagcacggatttccctgaaaatcgtgtagtccaatggtgtacggctatttatcggggagaaaaagaaaaggctgtgggaatgcttcagtcgcgtaatgaccaaacgaatacgacaccctgggaggcatctttccgtgattctaatttcgatttgatcgttcgtttgttttcaacagaacagtgatatttatatgatggtcgtatagaaattgaattaaatgaatatcatgtataaaataattaatacattatttactctgctgttgatcttgccggtaatgggacaaacgtctgatctcaacaattcttttaggataacagcaaatcgtgaagatggtcgtttctcaagttcaagaggagctgtccaatatatgttgaagcagaaacctgcgtttactttcaatccggcatttacggcgacggagtttaataaatggcagttgggcttgtgttccactatgaaagaattgatacgttttccggaggtgaaagaccagcccgccccagtacgtatcaaaatggtacagagggatggctatcgggtggagaaatgggagtcttatccgttgccaggaagcgttgttccttatctggtattgatacctgacgggatcgatacaactcaggataaggtgccttctgtgctttgtataccgggttttggtggcagtaaagaggaactggcgggtgagacggagggtgattacggtttgacatcgttgcctgttaagccgatgcgaaagaatgcgatggctttgcgttatgtaaagaaaggtctggttgcggttgctgtagataacccgtcgtgcggcgagctttctgacaacgggtatttcgattatctcaatacttcgcgtatcttattggaagtgggatggagctatctagggctgactgcttggcaagactggaatattctgaactggatgaaagcacagagctatatagataaagaacgagtcattatcagtggcttttctttggggaccgagccgttgatggtcttaggagttttggatccgtctatctatgcctttgtatataacgattttctgtgtcgtacacttgaacggattttggtgatgacaaaaccagatgagaaggggaggcgaccttttccgaattctatcgagcatttgatacctggtttcttgacacagtttgattttcctgatttggtcgctgccttggctccccgccctgttatttgtaccgaaggaggacttgaccgtgactttgagctgataaaggaagcctatcggatagtaggtaaaccggataattttacgttctatcattataagaagtttgccaacccgaaagaccgacagcagatagatcgagtacccgagggcattgatctggatacattcttccaagtagttaatgtcgatccaaagaatcattattttaaagtagaattggtgttgccatggatagacaaggtgttgaaatagattttttaatttattttggttcttcgtcactttcggggcagcaaatatgctaaagggctttatatatggactatgccagcatatttaagggaataaatattcagtgttataaaatggagttagggacatttactgaatatccctaattaataatatgttgtttatgtgaattatgcccccaaaaaacatatgaacagacagaagcagtttttgttaaaaacgaaatatttccccgaatagaaaaacagagtataaaatccctccaaacaaggcagaaaagcagtccgacatccctgtcacagttccttgacatccggatctcccaccttccagcatctggatctcaaagctccgacatccgggtctcaggaaacttttcaaattgttttcccaaaaaggcttgattatgtgacaaaataaatggctttagcatattttccatctaaggaatactgatctttaatttgatatttgactgatctatagctatttttcgttttaaatcatgatggtatatgatgaataatagttaaaaattaaaaccatcataccttaacatgttgttttcaaacaatataacttcatttatgatcgtataatagttattgttcccgaaaacttttattaataagaaatctcgttcacataggcacgttggccttccatatagctcaccccaatcaagtgcccatcaaggaagagagcgatctcctctataacacataccttaaatcgttcgttatatgacgtagactatcaaaggtttccaccgggctcgcaatcaaacaaacttctccctcttctgcaagttcagaagcccgatcagcatccagatggtactggcgaccaggaggaagatgcgacttttgatgatgatgctttcccagatgaccggcagggaattgcgggggatggagaaaggattgaggaggatattccaaaaagaacgctcaataagaggcgtattgctgaagatcaacagggcgatgccgatgataatcatcaaaacggcagttccgttaccactgcgggtaatggtggaaaacatgaaggcgaggttcccgaaaaaaaggatcgggaacatcagctgagccgatatctcaagaaggttgacaggataaagcaagagcgtagccaaccaggaaaagacgatcaggatcacgaagatcgccacgtagatcatcagtagacggacaccccataccttatatttatagtcggggatgccgaaaaggatttccagtatccggctatcctcatcgttctggataccaaaaacagcaggatagaacaccaacaggacacaggggaacatcaggaggttgtagaccaccccttcattgacctccgatcggctccaagcaatctgaaacatgaaataggcaaagaacagaaatgccgccaggagaaaccagatgaatttcccggcaaagataatcttcaggttatattttaccaagcgaggcaagagatatatgaattgtttcagtgtcataatgatttatgatttgagatttatgatttatcatcgacgcataaatcataaatcataactttttaaagttctttcaacaagcaaagataagcatcttccaagttcggttccacttgtaccgctccatcatacggagaggtggtcgagaggtaacggacccggatacggtcgtctttttggatatggttgacgatccgggacttatccaatgcctgttcaaattctgtcttaccgatatcgaactgccagacctttccggccgccatgccgaccatatcaaccggatcgccaaaatactttaggctgcctttgttgatcacgaccacctggctacatgaactggatatgtcttcgatgatatgagtagagaagatcacgatacgatccttgctcaactccaccaacaggtttcggaaacggatgcgttcgcgcgggtcgagtccggcagtaggttcgtctaccactaaaatacgtggcaggtgcaacagaatcagagcgataccgatacgttgtttcataccgccggagaaagaaccgattttctcatctttacggtcgaacatatggacggcgcggaggacatactccaaccgctcacggcgcagctcgggattgacgaggcccttcaagatcgcctgataatcgagaaattcccaagatgacatattctcgtatgtcccgaactcctgtggcaggaaaccgatcaggctctgcagttcctcccggtagacacgcgtatccagtccgttgatccagatactgccgtagctctgttccaaaatgccgcagatgatacgcatcagggtggacttacctgctccgttcggtcccaagaggccgaacatacctgtacggatctcgaacgatacgcctcggagtgccttgaacggctgccgacgtttcccgatcagcggaatacttttcaccatacggaaccacgaacgacgcagcccggcgaaacgtccttttacacgctcgatattgatttccttctcgtacagatagccagaagtcacatagattgctatgcagaacgcccacaacaccccgatcgtccccaccaagttcggattatccaatttgcggaacagaccaaaaaggatcagtggaggaaggccccaaaagatgatccggttaacgtatttcactgtccggcttcctgcaaaccgtccatagagatattcacgtaccttgcgccacaggtaaagcgttgcggcgtagactgcgaaagagagaagaaatatccacaacctgttcccgacaaagaaccaggtgaaccagatgccgaaacctaacaggacgaactgccagcccagttccataaagaatcctctttctcgcgtctgaagcgggatcgcagaagcaccagtggtatccgcataatcagaggaggtatcaggactgatcttttgcgatcccatgtcaggcacgggaacgggacagtcatccggcaatccggcaggtataaggtagtttttctccaaacctaaccgtcgacggatcagcaggccactcttccactggcggctgacacgtcccggccagtcgtatatcttcaccaggttgcggacggatatatggatgtccgtctccggatcgatcaccttcgaacgggcacggcggagacttgtctgcataaaataggtcactcccggaataccagccaacaacaacaccccatagacggactgccacaggagaccaccaccataaaaccagatacagccgactcctgccataaagagcaaaccgtgcagaacccatactttcgcggacagctccttgtaccattgcagcgtgttttccagtcccatacaaacggtagggatcaggatcagcgtcaacaatgcagagaaggaaagaccgccgatcacagtaatggcaaacggtgcaccgatcgctccggcatactcagagttacccatcgccatcggcaacatggctacgatcgtcgtgatggaagtaattaggatcgggcgaatacgtgacagcccagccgtcatcaacgccctgttgcggcaataacctcgccggcggagaatgttggcataatcgatcaggataataccgttgttcaccactactcccagcaggatcagaaacccgatcatcacgttcgcattgttcagcaggctgttgcccgtcagcaacaacgccagcagcgaaccgatcgcagccagcgggatggagaacagcaggacgaacggcgtcacaaaggactcgaacaccgaagccaggatcataaagatcaggataaaggcagccaacagcagaaacttgaagtcggcaaacatatcttcctcgtgaaacacttcgaccgccacgcccgaaggcaggttataacccgacaccaactggtcgatatccgaccggtagccttcgagaaggtctctcgactcttcaacgtcgcgcgagaaagaatagaacaactcaatctgcttgtcctggttcacacgggtgacacgggcacgcccgcggccataattgacggaggcgatatcttccagcctgtgcaggctgccggaagcgcttggtatatgcacttcacgcaggtcgtccaccgtcttgtcccgattcttgccagcctcttcctcctctaccgtccggttacggatgatgatatcgtaggtatcctcccccaccttgaaagaagtcccggacgaaatctccgggttcagagacgtgaggccggaagctatgttctggcgagagatatcgtaggaggtcagcaggatcgggtcgaaaccgagacgaatctccggctgcgggcgactgtaggagacacgggtattgcggatgaactcctgttcgtcgaggtaatagcggaaatcctccgccacccgctgcataagatcaaaatcagagcctttgatcacaatgcgttcgcggttctcaccgatacccaaaagacgcatgaagctccccatgccacccatcatatccccggagccgcctccccctctgctcccaccgcttccggcttcagaaagtgatatttcggcgccgttgatggtacggaggcaagtttgcacatcggatttaatgtcagtgatgctgcgcttcccgatctggcggtaatctttcttgagaacaagtgtcagctcggcgtccgtttcccggatacgactgatcagatcttgtttctccggaaacccggcaaggcgttcctcgatgacacgaacgacctggtcggcattctccagcgtgctgccggtcggcatcgtcacatagatgctgaaacggtcgctctccacctcttttcggtcctggatattcagggagacagaaaggatcaagcaaaggaacagcaggatgacggccccaaagaccgtcacaccgggattcctcatgcaggtcttcaacaacaccagatagatttgtaccggccgctgcgtgacagacactttttcataaaagaccgtgcccctatccggcttcctcagtaccgtataggtagccatcggaatgaaaaggagggcgacagcgagagagatcaggagagtcgagatgatggaaacgccgatatggtgtcccatcagcttgatcaaaaaattatcggaaaagacgaatggaaggaagaccgtaaccgttgttagggtagcggcaaggatggagcgccagacctcgcgcgtaccttgcgtcacggaacgttcgggtgtattgccggtagatgagatgcggtagatattctccaagaccaccacactgttgtccagcagcataccaatcgccagcgccataccaaccaacgtaaggctgttgatcgtaatccctgccccgtagaagaaattgaatgccgtataaacggaaatcgggatggacagagcgatgaagaacaccaaccgtaggttcttcaggaaaagccagagaatgacgacggcaagtagaccacccacgatcgcaaggcggatgatttggtcaatgttatcctccattgtctccgcttggttattctctacgacgatcgagaggtcgagcggggcaagctgctcgttcagacggtcaatcactccgaccgtacggtgagaaagctggatcaagttggcctgcgagtctgcaagcagggaaacggaaacggcatctttgccattgacccgactgtagcttgtctcctctttcatgtcgaagaaaacggtggcaacgtctttcagcaacacggggccagaggcaacgacgatgttttcgaggtcggaaacttcggtataaggagaattgacatggacaaagtatttcccgtccggctcactggcatagccgacaaacgccttctcttgcgtattctgtgttaagaggctgctaatagcggaaggagtcaaattgagggctttgcaggcatcaggatcgagttgcacctctatggccttctcgcgaccaccatagatattgacggaagcgatgccgtcaatgttttccaggtcgggccttatctctttctccactaagttacgaacccggtccgtaccacccgatccacgcacctggagcgacatgaagccaccggcaagcatcgaaacatcgatcttttgtacctgtactgtaaagccttcgggaagagaagaggcgatttcgttaatcttctcctgcaacttcagggcagtaattttgaagttgatattcgacttgaagtcaatcttgatggaagactggcggctatcgatcagggattcgatttgctctactccacctatggttccaatagccccttcgatagggatcacgacttccgactcgacatacgacggatccatatcctgtgccgaggtgacttgtacaaacagcatcggaagctccgcattaggcaacagttctaccggcaactgcttgtacgacacgtagcctaatcctgtcaaggctatgaacagcatacagatcgcaatcttcctatgtagtaaaaaattcattttccccttttcattttttcaaatacataatatacacacgggattaccatcagactcatgacagtcgaagtcaccaacccaccgatcactgcgatcgccataggtgaacgaagtgaagcaccttcgccgaagccgaacgtcatcggcaggagagctaggatcgtcgtgagcgtcgtcattaggatcgggcggatacgttgctggccggattccacgatggcatccgtcagctccatgccggattgtttcaactggttgatacggtcgactaggataatcgagttgttcaccgcaataccgaccaacatcacgatgccgatcactcccatcatattgatcgtcgtccccgtcagaaagaacagtagaatcgcccctaccaccgccaacgggatcgtcagcaagatcgtgaagggatgcaacagcgactcaaactgcgaagcgagtaccatatagactaggatcaccgaaagggccaaagcaaacatcaggctgttcatggactcctggcgcttctcttcctcgccggtaacggtaatcaaatagttggcaggcaagtcaatatctttcactgcaaagcgtatttcgtccgccaccttgtcaagcgaatagccaacatcgagattggccgttaccttgctgatgcggttctgtccacgacggaagatttctttcggagcctgcgaacaggtgatcgttgcgatctcctgcaagcgaaattctttctcaccgtttcgtatgaccagtccaccgaggtcgtgcaaggtgatatcgggaaccttgatcaggatatcccgcatctctccccggtactccatcttgccggattcgaggccgccgagctgctgcttcaactgttcgataacggtcgagacgctgacattatgaatgccggcaaccgtgcggtcgacggaaatcgttacctccggggcaccgtcttcaacggacgactggacattgtaaagtcccggcagaccggtgatccgtccttttacttcttccgtgatagacgctatttcgtccagttcctctccttttacctcgaccacgatgggggctccttcgtttcccaaaagggagctgagggagttctcttcctgcttcagggtgacctctaacccttcggtatcttcggtagcctgtacaaactgcgccatcacctcttcgggcggaacggggcaggaaggcgaaaggatcactttcatgacagccgtattctccccttcgaatatatcattctccgaaccgctacccgatccgacatggctgtagatcgtacacagggagtcttgcgagatggtgtgcatcaaatcctccaggttaccgacagccgaagcggtacgctccaacggagtcccttccggcaacttgataacggcagagaacgccttgctcccggctctcggcataaactccgtaccgataaagggaaccaacaaccccgctatcaccagcaacatcaaagcgcagccgatcaccacccaacggcggcggagcagcgtgcgcaacaaggggctgtaaccggtaatccggatgccgtttcccccccgtgtaccaccaccagcaccacgatcctgccgtccggtaatccggtcatacaacatcgggatcaccaagatcgccacaaacaacgacgataccaacgagaacgtcaccgtccaggcctgatctttaaacagttctccagaagcgccatgcagatagacaatcggcagaaagacgacgatcgtcgtcaacgtcgaggcaatgaccgcaccggccacttcggaggttcccgctatggcagcttcacgtatcgtcatccctttctcctgattacggaaaatactttcgatcactacgatcgcattatccaccaacataccggctccgagcgccaatccaccaagcgtcatgatattgagggtaagatgattaaagaacatcaagttgaaagttgcgacaatggaaatcgggatagccaagctgacaatcaacgtcgtccccaaacggcgaaggaagacgaacaagatcaccaccgcaaggataatccctaagacggcgctgctcttcacctctcctattgcattcttgataaaggtaccctgattcgtgatcacctgaaaacgatagccgggcaacgcctgctcaataaccgccaaccggcggatcacaccatcgacaaccttcaccgtattgaaacgcatttccttgtaaacagacaatccgatactgcgcttgccattgatgcggacaatattttccggacgatcattctcgaagctgacagtagcgacttcacgtaggaatatcggagctttgtccatagacgatgtggaaaccgcaccggaagtccccgaagccgtagcctcggccgcaaccggcttataaccgacaatcagattctcaaaatcactctccgtcgcaaacaagctcgaactcttgaccaagtattgcagtcccaactcgctgacacgaccgccggaaacgctttggttattcgcctctatcttggaagacaaatcatttatcgtcaatttaaaggcatccagcttataagggtccgtacggatcattagcgtactaacctcatcgcccgacaacgtaacatccgcaaccccttccagactgatcaactcgttacgaatatagctctccgccaccttccgaagctccgccatatcggtaatactacggtgcgaaagtccaatcagaacgacaggagactgattcggatcatgctgcgtgatcttgagttcggtgatatctttattttgggcaaaagggttcatagctttctgcaagtcaagaaaggcctcatccatatctttcttccaagtgtactcgaccgtaatgcgggcggaaccggcacggatcacggatgaaacctgtatcacgtcactctgccgaatcgccatcgactccatgttcttgacaaactgcttctcaatctcctccggcggacgttcgcctgccttcaactcgataaaaagacggggattattcaggtcgggcaacaggtcaaccgccaactggtcataggaaatcttgcccaacagcaggatcgccaataccaacatacaaattgtgaccggattgcttaccgcaaatttgataatacttttcatttctgaacttttacctttgcattctcttttaatgtctcgaaacctttcaccaccaagttatcgttctctttcagcccttccagaatctggatgtttttgtcgtcttccagcccggtcttgagttcgcgaagcagggccgtgttcttctcgacgatataaacgtatttgacacggcggttggactgaatcacatctttcggtatgatgatagcactgtccgccttattcaccacgatatcagctttgacaaacatgccgggacggagtttcaaaccgtcattctgtatcagtatcttccctttgaaagtacgggtttcggaactaatggcaggcgacaattcgctaatcacccctcggatcgtatctttgggcaacgtataatgggtgatatagaccggctgatccgctttcacatacccgatagcactttccggcagattgatatccatgtacatacgagcatagtccatgataccgactatcggtttcccttgttcgatacggacatcagacgtataatggggcaaatccacgatcacaccgtcgaaaggagctttgacattcatcttctccaaattgagcttaccgttctcgtaatcatagcgggcgtttgtcacttttacctccgtattacgcatttcactaagcgtcacaccgcctttctcatacaaggctttctgcttcacttgctcctgctcggctatttcaagactcaactctttggcatcgatagcgataccgttttcgtattcccggtcttcgaggcggacgatcagttgtcctttggagacgatatctcccagtttaaagggcttgcctgtacggggattggtttgcagtttgtacaagccactcatttcggaattgagcgttactccataggtaggctgtgccgtaccggtcgtattgaccagcttgctgatagaacctttcttcaatttcgttaccgacacgggtgtagcaatatcgttctgtgtattctgtggctgattattacaacctgccgtcaacaggacaaacaataagagagatgtgattgtatatttcatattcatattattttttcgttactaaatcttccatcgggacaataggcacatcgtgctcgaaatcgtagagggaaagtatcttaaggttcaataattcgatcttataattgataagcgcctgcgtataggcgatctttttatttgaaagctgggtctggaattggttcatgtccataccagttatatcgccctcccggtaacgggtcagattcaaatcataggtacgctgtgcatttgcaacattctgcttggctatcttgatctgcgaaagcaagttttccaggctacgccaggtctggcggatgttcagttcaatgttgactttgtcttcatggaattccagcctgttgatcttctgggctacttcctgcgccttgacacgggctttcttctctccccaatcaaagatcgggacactgaagctgatggcaacacgcggattctgcgtcgggttattataaatcttttccagatgtcggttatcaccgatcagaccgaaagagagagcaatatctcccttgaactcgttcagagccttcgtcttaatcatatcgaaagctagttctttgctctcaatctcacgctgacgcagttccagacgcgattcaagaccatgctgtatcgccttttccagattcacttccaccggcttgatctgtacttcggcaaagaccatgatatcctcgttcagatccatccccaacgtctgctttaactggtctttcgagttttcaagcgatacttgctgttcttctagagaagaacgcgcggaagcgagattcacttccgcttgaaacaactcatcgcgggcagccaggtcggcttccaccttattcttgataatctcatagctttgctgtgcattggtcagttcttccctagtaatagccaattggctttgtgccatatagacagaatagaactgttgggtaatatccttttccgtactcaatcgttgcaatgcgtagctgatattggcattctcataatcgtattcgatctgttgcagttccatcttacgcttgttataagtaaagatgggttgcgaaagctgcaggtaaaggtcgttgctgaacgccttgttactggtcttcgtaccgtcgatattggagttattatcctgccagccgaaacggttgatcaatgagagaacaccatccgtccacaagatcggttgatccacttggaatgttccagtcgcactgaacctctcattcgtataccactgagacaggcggttatcgaaactgcggctcttgctgtaatccaccggattaaggttcaacgagaacttcgatttcagggaagcccgctgtgcaaccaagttctgctgataacgttccagattcatgtgggaacggcgcagggaaggactatgctcttccgctatatccatcgccttctcgatcgtcagcgagacctgcccctgcaacgggacatacccacctaggcagacggcagccgtcagtattatctttttcatggatagtaactctcttcgtatcatgtatctaattctattaatatcgttttactattttgaccgcatctgccgtcacgcttcgtagcttgcactcgttcgtcagggtgatccggaccgtatcggaactgaagtagtaggcgcctataggttcccagccttcattcgcttttttcagatctatataagcatcttcgttttcttcgtcatactccaccttaaaatggtattcaccgccagcctgcttattatatttcagctcattgtctttggaaacataatagtagacatcatattgtccggcagaaagaatcggaactttccaggttgccgtttggctgccgttaccactcttgatcacataggctgaccggatatagcggccatagtaggcggcattcgtcgtagccgtccactgcaacggggcacgccagggagagacaccggcatatttaaaagaagtattttcgaccttatcgagccacttgggcagaagcccaaccacggctggttcggacaggaaaaaaagagaatcttcattatcgacgaccacctctccttccactacgggagaaaagtctgtaacaatgaaatctccttcggtatcgaccgccctctctcgttcttcccggatgttagtaacaggcaggttcagtatactcggcagatttccggctatcagcgtattcacatccacttggcgaggcgcttcctcccagaccgttaccagcaacttggtctgtcgggcggcaagaggcagtttacggctcacacgcggatcgatactcggaccatagcctccgatctgtatattgagttgaagcataccgtcattatcagaattattgctgaccaattgcttcagcacgaaactctcctgtcccttgttcgtgatcttggtcacttcgggctgcccgatcgtatagaaaggaagaggcgtcggacgatcccatccggaaatacctgcacggatatcggccccgctgatcatctccaacgtatctaacaggttctcgaagcgcatattacgaaattcgttccgttccaacagggcatacagggaatccctgaacagacttatccccatattcacttcggcaggagcaaacaagcaataccctttcagactgatcgtgttattcagcaaatcgagatgtttcacatcagacagaagctctttaaacgaatatctctccatcagcaggttcgctttctcattattgctgatcccgtttatctcgcgttcccacccattattatcggatttcctctgcagataaagttcgaccaaccggttcgtaacagaccattcggaagaatagatattataccggaaattatagagttcgggaaacaggaaatatggattgctttgggaagagatattgaacttgcctcgactgccagaagagaaattataattaccttccgtctgcgaaaaaatccacaggaaactgttcatcacccgaatctccgcctcttcttcactgatctcacgccctccccgcttcgaccatttcaactggtttttcttgcttctgacaaaatccatctgattgaacatacagcccagttccgggaaaagaaccatttccggctgcaccacttcctgcgcttgcgaccaggaacggacatagctatagaactgtgccggaacttccaccactgaaaaccggtcgaacgggtaactcaacttatacgtacgttcgagattctcccgcaggttgcggatcaatcccggaatcgtatcacggatcgaatcgaacgccgcctcgtaataatcgtgcccttttatatgccagatgctatagagcgtactatcactttccacactcttctgttcgtattttccgataataagggaaatggactgatagggattgtttgctgactgcgaaatagcaaccagtccgggaagcggcttcacatccaaccgaaaacgactgaaataggtctgttgccaatcaggactcttgtcgctataccccgttccggggcgcggataccaataggtttcgggcgtaaacagcacataatctgatgtctgaaaactatatttcttatcgagcttaagcatttccttatcatacggttgctgcaagacctcctccgggatatccagataacaaaaatcatcttttatcctcccttcataactgaccgaaaacgaaatggtatcacccttttctatctcccttccgaaatccaccgctaaaatctgttcctcccgcttaaaattcaacgacttctctccatcctttacctcctcgaccctcaatccgggattcaggcaaaagataaatacttccgatgcagcaagcgccgttccctccatcccgacaacggaacggattgtttcagacttctgttccaccgaaatatcgtagtaatcaatcgccatctttggctcatatacatatttattgttaatacttgtgtacaaagcacgcatctccccttccctgagaatcgaacgtacatgtcgaaaacctgccgtccccatcagcaagaacatgcagaacgaaaggaataaccacggataatggcttctcctagcattcggcaaccgcttgaacaagaagatcgtaaagaagatgaatcccaaacctgcaaagaaataaatcgctcggtggtttaagatcagctccaggttactgaacccgacgatcgtcgatttgaacaacggcaggttatacaccatataatcgaacagatagtagaacttatcctgtatataaaacaaggtcagcccaatataccctaacaaaagtataaaagtgagcgcctggttctttaacaacaacataaggaaaattgaaagtccgatgataaatatcaaagtaggaatactgatcagaaagaaataaatcagataagccggcaaatcgaccgtcacgcccgatgccataaagttaaaagccagcacaatcgccaataccagcaggttcaggaacaggaacaccctgaggtttccccatatcttcccgaccacatactcggcattactgagcggccggacataaaagacctcggaagtatcgagcttcttgtcccttttcagaaattcggaagaaaggaaaactgcgaccaccgcctgtcccgtattcaacaacaaaaggttcagatagggtatattggatgaaaccgattttgcaaaccacaggccgaaattgtcctccatcaacatcatggcaaagttgaaaaatcctaaaaacaccacggcaagcagggtgaagatacggaaaaaccaactcctcaccaatatcttgctttcgtatttagctacagatcgtatattcgtgataaatgacataggcaagtgatctcttttaatcgtttctccaacggttcaacttgttttccatataatagacataggcatgttccagattaggcggataggattccgcatcatatccctgtacctcgtcagccacgacctgcacttcccagcccgtaccggagggaatcgtcgagataaccggatacagtttatccacctcatgcaattcgtcgctagtcacccgtatacgccacacttttccttccgcctgcctcaacatatcttgcggggaaccgtaaaaagaaacttctcccttattcataagcgccatacagttgcatgtactcgatatatcgcccacgatatgggtggaaaggataattgtcacgtcgttttcgctgacttccgacaggagattgcgaaaacgaatccgctcctcaggatcgagccccgtcgtgggttcgtctacaataatcactttcggatgatgaatcaatgcctgcgcaatccccaaacggcgcttcatacctcccgacaacttattggcataccggtcgcgtacatcgaaaagtccgacattctccagcatctcgtccactgcatttttccgcaaagacttacagttcataccggaaagacgcgcagcataatctaaaaactcatacgttttatatttggcgaaaaaacggaaatcctgtggtagatatcccaatatcccccgtatctccttgcgctgccgcatcaggtcgtacccgcagatattcacctcacccgaagtaggttccataagagccactaaaatacgcatcaaagtagatttgccagccccgttcgggcccaaaagtccgaacataccagtcggtatttctagacagacatctttcaatgcgtggtttccgttcggatacactttattgagttttctaatcgatatgctcatcaacaagtaaattcaaattcatataaatagagagtctaaagataatagttataatataaaaacaggcacggattacatggatttcacagttttaaatcaaattaaaccgtgcaatccgtgtaatccgtgcccgaaaaacagataaaactatgtaaatctatcgattaatagttctgtttcatcggttcgaagtaagcctgaggatgttcgcatgccggacatttctgcggagctttctttgattcgataacgaaaccgcaattacgacactgccataagatagcttcggctttttcaaacaccgtacctgtttcgatgttagacaacagcttgcgataccgtttttcgtgttcagcctcaaccttggcaatcatacggaaagcaacagcaatagttttaaatccttcttcttcagcaatatcagcgaaagcagggtaaaggtcagcccactcttcgttttctccggcagcagcagcagccaggttttcagcagttgttccgatcacgcctgccggataagctgctgtgatttcaaccataccaccttcgaggaatttgaagaaacgtttggcgtgttccttttcctgttcagctgtttccataaatacacctgcaatttgttcgtaaccttcttttttggccacgcttgcgaagaacgtgtaacgacttcttgcctgagattcaccggcaaatgatttcagcagattctgctcggtacgagtacccttaatacttttttccataatgctaatttatgtatatataaaataagttcatataatcacccctaaataaataacgttcaaaggtaggaaaatgttcaagcaaacagcaaatttacatatacaaaatatttctataacccaatagataatatttatgctaacccgaaaataaattatttaagtatctaactgcagattcctttgcaggagacagaaggtttcattgcaacaacagattcatacaagcttataaaaaagattaaaaacatatttactttttttgtaactttgcagcacttttaatcaatcaggcagaaagatgaagaacaagtttgattttcagcccaagctagtatcagcgctgaaaaactactctaaagagaaatttatgaccgacctgatggccggtattattgttgggatcgtagcattaccactcgctatcgctttcggtatcgcttcgggagtaagcccggaaaaagggttgatcaccgctattctcggtggatttttcgtatcgttgttaggaggatgcaacgtacaaatcggcggaccgacaggtgcgtttatcgtaatcgtatacggcattatccaaaatttcggaatcgaaggactggctatcgccactgttgtcgccggtattattctagtaatcatgggggcgttgaaactaggaacagttatcaagtttatcccctacccgatcgttgtcggtttcaccagtggtatcgccctcaccattttcaccacgcagatgaaagacctttttgggctgacaatggataaggtccctgcggatttcatttccaaatggatcgcctatttcgaacatttcgatacgatgaacctctggtcgttactgatcgggcttaccagtatcgtgattatcgccatcacaccgaagttttccaaaaagattccgggttcgttgattgccattatcctgatgacagttgtcgtctacgtcatgcgctatcatttagggatcacgggaatcgaaacgatcggagaccgttttacgatcaatgcttccctgcccggtcccgaaacgatcaacttcaatatggaaacgatcaatcttctgcttccttccgcattcaccatcgcaatgttaggagcaatcgaatcgttgctgtccgctacggtggccgacggtgtgacaggagacaagcataactccaataccgaactgattgcacaaggggccgccaatatcatcgtacctattttcggcggtattcccgttaccggtgcgattgcccgtaccatgacgaatatcaacaacggcggacgcactccggttgccggcatcatccatgcaatcgtattgttactgattttgctctttttaggtccgttgaccaaacatatcccgatggcttgcctggcaggtgtattgatcatcgtttcatataatatgagtgaatggcgtacgttccgttcgctgatgaagaatccgaaaagcgatgtgtcggtgttgctggtaactttctttctgacggttatcttcgacctgacgatcgcaatcgaagtaggattgcttatcgccatgtttctctttatgaagcgtgtagctgaaacgactcatgtatcggtagtaaaagacgagatcgatctatcggacgatggagaaatccaccatgacgaagaagtcctttcccttcctaaaggtgtggaagtatatgaaatcgacggtccgtttttcttcggggtggcaagcaagttcgacgatatcatgcacaatatgggagataaaccgaagatccgtatcatccgcatgcgtaaggttccctttatggactcgacaggattgcataacttagagaacctgttccgcctgtcacaagccgaacacatacatatgattctttcaggggtgaacgagcatgtacgtcgtgtacttgtcaaatctggtttcgacaaaaagatcggaacggaaaatatttgcagcaatataaacgaagctgtagcaaaagcacacgaagcaataagataaataaaaaatagctcccgtcctccttttttcagatgggagctattttttcagattggagacaaaagataattctgtacgactcaaacatcacacaaacgctatatgaagaaaacggtctcccgatttatccttccttgcctcaaacacaaactcttttgcaatcgtctctgcatcttcaaaactaaacccattctccggctggctccaataccagagctgcgggacattttttttgctattcgatgattccattattttatatatttatccaactttatccataagacacagaatatgaaaaaacccctatccaaatcagaaataaatattacatttgtcaattctgtctatacctctaaattggataccaggatattggttatacaaaaacagatttatatccaattataaaatatatgaacaaaaaggccctactcccgctaatcggtttattcctgttggtaacaggaatagttcttcccggatctgtccatgcacaaatcagcgaaggtggaacacccacttccttcaagtatcaaaacacactgaaaagcgatctgccaaccgttcagatccccatcaatttcagcgtagaggacctgaaaacagtagacagatggcaggtcagccaaggggcaccgttgaaagtaggagttttactcccgacagacctgacaatagacaatgctggtagctggaataccctacctgatggcaaaagagtatggcgactacaagtacaggcaaaagacgccatagctttaatgctcagtttcagagatttttatattccggaaaatgggaaactctttatttacagctccgataaaacacacctgattggtgcctttacccatcataccaatccaccaacgaaagaatatgccaccgaatttttagccggtgacaagatcatactcgaatatgaagcaggcatatcggaaaacgaacatccccgcatcgcaatagatgctgtaggatacggatataaccatttgcatgtttcacgtacgatggccgatacaggccctggcacttctggatcttgtatggtaaatatcaattgcgaagagggagaagcttggcaaacagagaaaaacggtgtttgccaaatgacattgcctattggaaactacatctatatctgctccggagctttggtaaacaacacagctgaagatttgaaaccttacatcctttctgctttccattgcattgacttggatataccagtcacagaaaaaaacttaaacaaatatactttctatttccatttcgaacataccggatgtgaaaataactccagtatcgcatcttatagaacaataaccggatgcaagaaaatagccggaatcccattagatggcggttcagacggtctgcttcttttattgaaccaaactatcccggaacactacaatgtctactataacggttgggatcggagcaacacagccgcccaatcaggagtaggtatccatcatccgtcaggggattatatgaagatatcgactttcaacaaggtggcaaggacctctacttggtatggtatagacaacatcaaaggcgcaccaaacgcacattggaacgtcgtgttcgaacaaacagccaatgggcatgctgtaacggaaggaggatcctcaggttctccattgttcaatcaaaacaaacagattgtcggtacattgagtggcggttcatcttcttgcgaaaaaccgaacggagccaatacttatggtaaactttattatcactgggatcagtatccaaacaaagacaatacatctcgtatggatatatatttagatcccaatcataccggcaaaacacaactggccggccgatacgcgacagctccgaaagcaatgccaactgatctgacatcggtctaccaaaacggagaggttctattgaaatggaaagcacccgtctctgccagcgaaaaaccggaacagtataacgtttatcgaaacaatatattgatcggacgtaccttttctacatcttatattgacaaagaacctgaaaccggtatccaatcttacagcgtttccgcatcgtatacagacaacaaagagtctgctgtagccaccacatctatttatgtctatgaactgaagatcccaaccgatgtaaccacctcaactgatggcaagaatatcctcgtcaaatggaaggaacctatttatcagcaaatgatctactggggaaatgggacagcctatctttcgttaggtttcaaacaacctttctatttcggacaaagatggaataaggaagatctgaaacctctacacgggcaccttgttgaatctgtttccttcataccaacctcaggttcatcttatacgctgaacatcatacaaggaaaacgaaaatatatacaaaagttgactaatttaccttttgataaattaattgaaatcccgcttaaagaatcatttgtcattgatgcttcccaagaactaatcattgctttccacgctgaagctaaactatccaccgcctatccagcagtcatggacgaaggaccagcagtcaatggaaaaggtaatttaatttcattcgatggagaaacgtgggaatatctgtatgaaccttctgaaaatgaaaattatgatttcaacttctttcttgccgccaccgtcagttcaaaaacaaaggatatcccaactataaaaactgcatccaacgacacaacattattaagtaagtcatcagcaatacccatactcactcggatatccgaagtcggttcttcactccggagcagccaggcaagtgcatttccgacaataacaggttataacatttatcgtaatggaagcaaaatcggcaacgtccccaataagtttatcacccaatatatagacaagcaagcaccgacaggtagtatcttgtatcaggtttccactctatacggaaaagacgaaagcaagaaagcggatgccgacaaagaagtaaatgtaggaaatgaaaagatcatcctttcggaaacaacgatctctcccactgtgtttacagatcaggtagaactattcggaaatgaaaaagtggatttgctagaagtcatcacgttagacggtaaaacggtcattcgccaaaagaaccctggaaagatcgtttacaccggctctctttcttccggtatttatatcttccgcatccatacagatggaaaagctaagacaatgaaagcacaaaaaataaattgagaattaaaaaatggagaattgaaaagcattgtaagaagtcacaatgcttttcaattctccattttttaatttttcaagctgacaccgttacatcaaacccttcttgacgggcacggtcggcaatagcttccaattcatcttttgtcaccttcttcaagttttttacgggagtttcacggtcgattgtatagatcatgacctgtctaggcttgatttgttttaaagcttccaaccaaccggaaatttcgtgttcggttgtattcgtcacgctttctccatccacttcccctttcaggaacatggtttgtataatcagattgccattaaaacggcaaagttgttccaacaacctatcgaaagtaaaagtcgaggaattgggaacattcaactgcccgatacgactatccgatatggagtcgagtttcagtatattatcttcaatcttattcaatgccaagaagacatcctctttatggagcatggtcgagttcgagagcacggcaatcttagccttcgggaaaaaacggttacgggtttcaatcgtatcatcgataatatcggcaaattcagggtgcatggtaggttcaccattcccagcaaaagtgattacatcgggagcaacaccctctgcctgcatggaagacaatttatttatcaaagcctcctttacctctgcacgggttggcagtttactgcgcgtacgatgattctcgtttagtccgcattcacaataaatgcaattgaatgaacaaagtttcccgtctgtaggaagcagattcatgcctaaagaaacacctaaccgacggctatgtatcggtccgaatactattttatcaaaaagaattgtagacataataatttatatttaaatgcaaagctacaaaagctatcaaaatgaagagatgaatctcccctgctttatgactatttagcaaaccgtcagaatttccagcgtagtaacgtatatatatctgctttaatattcccttcgatctcttctaagtcagtaccgaccacgtcacgatcagcataatatgtgtatcctaatttagcagacacagaaagttgcttcacaatatcccaccggaaagaaagcgccaaccgaacaccttttccataaaaggaaggcatattgaaagcatacaagatatttttttcataagaaaatatacgggtccgataattatccgtatgaaatccggctatatgaaaatctgtttgaacaggaacatcaaccggtttccaacctacgctttgggcaatcatccaccctctgcttttttcgttcgcttctgtataacaaataccgtctgcagatgtccgcagcgagacggatgaagaaatcgtatataaggcctgcatacgcaaacgctgttgatggtaaggtgttatattttccctttgtttgtatttataacggacgtatacggacaaattccggctcggcgtataatcaatttgaagcatatattcctttcccgtcgacggcgcatccactccatatttcagccagggaaaccggaatacatctgcatacgcggacaacttccagcgggcaaaaggcgtccattgcatccctatatacattccctgttcattccggacagccgagttttgtgaaaaagcattcccgaaaaaagcctggtaacgtttatcataataacgatacaataacagcaaggaaaaataagaagcaggtgtcaactgcaaggcattcagggaagcaaccgccccattccggcttaaagccgtttcaccataaaacttgatcaacttatttttcaacaagtaatccacactgatattcagattccggttaccgcgaaaatagaaaagattataaggtttcggatcgggctgtatcgaataatttccgaaagaataagaaagggcagtcagacctatacataaaccgggagttgcatatcgtacattcccaccatatgtctgcatggaaactttatgcatcttctccctgtctcgtaccaaacgatgtaaaccgtccgttttaaacgaagtaacgatcgtactgtccacacctccatccaacttccgatacgaatagaagaggttgatatctaaatttttccaattgacagtagcagcagctccccggaaaaagtcattttcattggttgaaaaatgacggcgaaatccgtttgtccttctttccgtttgtgaaacaagagcatttcggcctggagaaaagtcattgctgatcaccaagccttgcccaaaagatattttataatcacctatggcaagacttttcaaccatttattcatttctttgagaaaaagatgcaccgaataatagtcataccctttatgatattcattccagaaaggttctcccacatctttttctgcaaccagaccgaattgaatacgttcatcaaattcatacgaataacggacagaatgatagaacggctctcccagatacttccgattcggatattgttgtagtacactatcgggatatgaacaatagcctttcttttgttgaaaacatctgtcatatctgatttgtaagttattagaacctcgtttcaacaaatttttcactgtaataggacgtttatcaactattatttcacttatataaataaacgggacaagcagagaaatcgtttctaaatcgaatgcttccacatttttaagctcataaagggttaacatttttccataacgggaacgatattccaacaattcccttatttgtagatcagataggaaagggagacgtttcaattgtccctccgtcaccgtattgagttcgaaaggatgttcggtaagataggaaagatcagtgtaaagtgcttcaatacgctcttcatcttctgtttccgaagccatttcttctatatattccatccacttatcaacagaatataatgtctgacttttaagctgataactacttattaacagatataccaacagatttataaacattcgtttcatagtcaagcctgattaaaaagaatagctcaaacccagtccggtactgactcccaaaaccggatgataaatagtcgcgacatctactgtaaatccagtcagacggtatccgatccccaaagtgggcaggaggggagtagtctgtacccccgcccgtatatgaaagtttttgaacggagcatattcaatgcccgcatttcccatccacatatgttctttattactttcgatagttcctactatcaacaacctgttaattatctcccattgaaaacctatttgtactgaataactagtaaaacattttgtttcagtagtatattcatgaatggtaatagaaggaaaattcattatcaacattccaatcaacaatttgtcaatgggaacaaacaagattccgacatctgtggaaagctgcttcggtacttcttcccacaactcggtctgcaacattttatattggaaaccaatgccgatcctccaccggccattcagctgtttccctaccgataaccgaaaaagagtttccctatactgatcatatccgaaagaagagatatcaacacctgccgacaacaacggattcggatatacaaaacctattccaaccgttcccagttcttttactccataacgattaaagtattctaaatgaagaactttatccgtatgcaaagccaccaatgccggattaaacaaaacagattgtgtaaccccgtttcctcccattcccaaactacggatatcagatatacgaaggttatcaacagcatgaatgttgatagatgcccaaaacaacacgaataaacttattgatttcatagcaaggttttgtttaagttgtcaactttccggattatctcttttcacagcctgaagttttctactatctccattttgggctatcagataatatggttgcaatttattcagaattgataaatatgggaaaatggtggaatgtttcatagtctgttgattttagttgtttgtattatcacaaagatatgaattttctgtaaaatctgtagttactattcgtaaatcaattacttttgtgaatgatgttgagaaaaggcaagtataaaatattgataatattcatgttgtgcgcaataggaatccatgcacaaaaattgaagatcaataccgttcccgaaggattacaaaaggcttatctggatggaaaggatacggtacctgttgttaacttgaaggaaatttacatttacccgccggtcaagtttaaaaacaaacgtgaacaggcacgttacaccaaactggtccgtgacgtaaagcgcacactaccttatgccaaaatggtttatgaaacactgatcgaaacatacgaatatatagagacactccccgacgaaaagtcccgccaagctcacttgaaacggatggaaaaagaacttttccaagaatataaaccgcagttgaaaaaactgaccttttcacaaggaaaactgcttatcaaactgattgacagagaatgtaaccaatcgagttacaacttgttgaaagcctatttaggtagtttccgggcaggtttttggaacatatttgccggcatgttcggcgccagcctgaaaaccgaatacgatcccaaaggaaaagacgccatgacggaacgggtagtcgtacttgttgaaaacggattaatctgacaattgcttaaagaaatcccagatgataataccggtagtcaccgaaacattcaaagaatgcttggtcccatactgcggtatttcaatacacatatcacagttatcaacgacacattgttgaacacctttcacctcgtttcccatgataactgcatactttttattcttgtccaacaacaaattatccaacatcgtactcccttcggcctgctcaaccgcacagacagtatatccctgttgcttcagtttatcaacagcctccatcgtatcttcaaaatactcccaatcgacagtttcttccgctcccaaagccgtcttatgaatctcggcatgaggcggacaagccgtgataccgcacaggtaaatactctccaccctaaaagcatcagacgtacgaaacacggatcctacattgtttaagcttcttacatgatcgagcacaacaaccaacggaatctttttactatctttgaatgcttccggagtcaagcgattcaactctgttatctttaacttgcgcatagctatcgtttctttgcttgcaaaagtagtgaattaatgtggatataccgttgaaaagctattgataagtggtggacacaaaatgaaaaatagttcttgcattattcaatttgttcactatacatcctctagtttctattatgcaataaaaataacggattatttattacgccctatcaacagtggttatacacgtatcaacagcgctcaactgccattaacttttacacataggttgttttcaactgaatactaataaagtctataaagtaaaggatatcagtatgtaaaacgataaataggatgttggtatctatttaataagtcatttatatcgtttaataacgaactggacaagtattatagcacaattgtattaactgtttcaacaggatattatattcatcatatttagatttaaaataaagaataaataagataataataatatgattgtggataacttgggaaaagaacgcagatgtttgggtgaatatctgccggaagtctttgagacttgtttagcaaattttttatattacctcctgcttgtttattcgttttatatgtgtttcctatgggaaaatcaataaagtttttacctttgcacattatcaacttatagttgataataggagtaaaataaagattatcagttataaagaatgatgataactttgttgatagactgtaaatagcggtttatactcattagtgattatcgaattttacaatcatttaatacaggtaactatgttgacaaaccaatcgatcggatatatagacgcacccatcccaaaggggttggacctgaaagaagagataaacaggatgcgtagagaaaaaaacgccgttatccttgctcattattatcagacaggtgatattcaagatatagcagattttgtgggagacagtttggcattggctcaacaggcagctaagacgacggccgatatcatcgttttctgcggtgttcattttatgggtgaaacggcgaaggtgttgtgcccggacaagaaagtgctggtcccggacttgaatgccggttgctcattggcagatagctgtccggctgtcgattttgcggaatttgtcaaacagcatcccggtcatgtggttatttcgtatgtaaatacgactgctgctgtaaaagccgtgacggatgttgtggtaacgtctaccaatgcacgtcagatagtcgaaagttttccggaagacacgaagatcatcttcggtccagaccggaacttaggcaattacataaatggcattaccgggcgcaagatgttgctttgggatggtgcctgccatgtgcatgaacagttttcactggaaaagatattggaattgaaaaaacagtatcccgatgcggaagtcattactcacccggagtgcaaacagcccgttgtgcaggtctcggacttcgtaggatcgactgcagctcttttgaaacatactgtcaagtcggataagaaacaattcattgtagcgacagaaagtggcgttattcacgaaatgcgtaagcagagtcccgataaagaatttatcccggctcctcccaatgacagtacatgtgcttgcaacgaatgtaattttatgcgcttgaacacgatggagaaactttacaactgtttgaaatacgaacttcctgaaatatttgtcgatgaacaagtacaggaaaaagcgatccgcccgatcaagaagatgctggagatatcggagaggttggggttgtaagaattgttagatagacgaaacaagataaaatgatccactgtgaataagacaaataccacagtggatttttattttataactgcgattttagtaactacactttcttttgaatcttcggtggcagagagcaccagatatacgcctgaagcaacacggacaccttttgtattccggcagttccagataacttgaccacctaaagatttagtctgatagaccagatttccattcagatcggtgattttgacgatcgagttatccatcaatcccgtgatggttactttgtccctgtattcaggtcgtacggggttcggatatgcatacacgtctgaatagtcatctttaccttttgtcgcttctcctttgtaagaaaccaaacctttgtcggaaccgatgaacacttcgccagtattttcattaatttctatggaatatattttatctgatagtagcggactgttggatgtattgaactgatggacgatttcctgattgtcttcgctcaatacataaacaccgctaccgtccgttccaatccatttccggtttccgttatctaccttgatggtcgttattatcgtattgtcgagaaaataataagggattccttcttcattgattagttttacacgtgtgcaacgcatagattgattgttttctgtcgttgccaactttggatttgttaagtatatagctcctttattggttcctatccatatatatccgtttttatcctctgccatacaagtataattgttaggggaaaagtcgttattatctgtgtcaatgaagtttttaaattcatatgatgttgcttcatctaaagagttgctgttggtgacgactgttagacaggcttgactggtagggcgagatatattgatccatttgtcattgtttgaggtgacgagtatgtcgtttatcgtgtattttccatttaacgactcgacagacaggctatgccattttccttctttatccaatatcttgatagctttgctcacttcagagttagtcatccataggtttccttccttatcgaaagcaagtccgtctacacgacaataaaagccctcattgccatgtgcgttttcaagcggactgtttgttttgttataaacggcggaaggttctctgtctatgaattgaaaaaggccataaccgaaggaagatacgtaaataatctctttttcagtatcattttttgtgacgacaatgctggtatagtctttaggccatgtatttagtttattctgaacgacggaaggttctagtacactccatttttcatagtcatatatcatgaccgatccggctttattaaaagaattatcccctgtcaggctttttccaccaggtataatatatattttatcgttttttgatacgatatcataagaactgttggagtaggggccatccaaaattatggcttcgtttatggcttcgaactggttggctccttttctttggatagaacgtagacctttgcttccttcggctatccaatatttgtcagtctgataagtgctgatatctttgatggatagattgttgatttggtcaaaagttttcgtatctgtgaaaatataaacttgggatgtggccatgcaagccagtttttctcccacaattttcatattgttcatttgtgtgttgctgaccaaagggactgtagtttcattcgattcatagtagatacctttattttgagacaaatagaatagcttatttttaaatgaggatattttgtctatggaattttcagatgggaatcccggaatcgaataagttttccagtttgatccgtctaacagattatcattcaaagaagcgtatatgaccgtagacttttgaccttcctttgtggaagcatatatattattgttgaaaatagcacaggatgtaatattcttagataagttataggtatcggttatttcttttttgtccatgttaacaactactatgcccgactgtatggataaataggcatattcgttataaatcataacggaattaagtgatttatctcttaaagatgtagtcgtgtacagataaggtatgttttttactgaaccttcttctaaaatgtctatattgcagtttttgtaaacaatcaatagtgattttgtttgtttgttgtaggaaatagattggatatccgtgtcactcaatccatttcctttgtaatattgtttgatgctgttatcttctttcccatatgtgtataaagcaccttctgctacgacaaatacttgatctgcggattcttccacacaatcggtattattgtaggagagatatgttttccatccaagcgtgttgccattgtcattaactgataaagcaggaaatgataataagaaaagcaagatgacagttaatatatttctcatattaattacaatattaaaaagtgtaattcgataaaaaagcagtcaattttttgacagcttcggcacggtggctgatctggttttttatatcattgcccatttcggcaaatgtttgtgagtaagtgtcgggaacaaatatgggatcgtacccgaaaccgctttcgcctcttttttcgtttatgatcgtaccgttgacaataccttcaaacaaatattcttttccattcaagataagagcgattaccgtacggaaacgagctttccggtttttcttgttttccatttcatggagaagtttgtccatattggcttccgaatcatgtccgggaccggcataacgtgccgaatatactccgggagcgttgtgtagggcttctacttcaaggccagtgtcgtctgcaaaacagtcatatccgaaatgttcttttatgtaacgggctttttgcaaggcgttgccttctaatgtttctgctgtttcgggtatatcctcatggcagttgatctctgagaggctgactatttcggtatatccggatgtgattttccggacttcatctagcttatgtcggttgtttgttgcgaatacaagtttcatgtttgttgagtatgaataaaaaagcacttctatacgatgtgtatataacgtatggaagtgctttaaattgtttggatgattgttttatgtttttatctggtcaaacccttccccgtatacccctctgacgatactttgagagatgaaggcctgatggtcgatttgttttaccagacggaaaatggaaacggattctgatttttttgccagcaatacaacgaccttgaccggtttgcgggaatatccgcctacaccgtcgagaatggtacagccgcgatccaggtcatggatgatccgctcagctatttcatcgtatttctgagaaaagatcaggaattggacggattgacggttcccattcagtacggcatctatgatatagttgcttacgaacatttcgacaaaaccgaacacgatcttttcaacatcatggaaaagaaaaaatgaggaaccgatgataatgaagtcacaaaacaacaatgcacgcccgatggagatatttttgtatttgtttacaatagctcccacgatatccgttcctccggtactaccgtttgccgaaaagacaagtccgagacctgccccgcaaaggaatgcaccaataataatggacatgaacggttggtcatgtagaagtggctgtcctttcagaagccattcgaagaatgacaaggaggctgacagggaaaaaactccgaaaattgtttttatcagaaatttaagtcctagaatttttaaagcagccaataatagaacaacgttgataacgaagtaagacacagaaacgggaataatctcgttactggcaaaaaagatcaaggcacaaataccactgactccaccggtgatgatttcattcgacagaatgaaagcgttgaagccgaagccgtacaagagagtacccaacaggatcatcaggtaatcttgtacagcaaaatagactttgttgtttataagcttcattataatatagatttagattacgatgtttacaatctttccgggaacaacgataatctttttcggagtcttaccttccatccacttagccgaattttcatgggcaagagcggctttctcaatctcttcgcgaggcatatctgctggaagttccatgctgaaacgagctttgccgttgaaagagatagcgtaagtaagcgagttttctttcaagtattcttcgttgtagacaggccattcggcatcgcatacggtagtattgtgaccgcaggtatgccataattcttcagcggtatgaggagcgaacggagcaagcagaacgattaactgttccaggatcgcccgtttgttgcatttcaggctgctcaattcgtttacacagatcataaaggcactgatggaagtgttgtatgagaaatgttcgatgtcgtatgtcactttcttgatcagtttatgcagtgatttcagttcgtcggctgtcggttccgcatccgtaatctgcaaggtgtccgtattgccgaagaacaatccccagagctttttcagaaagcggtgtacaccgtcgataccgttcgtatcccatggtttggattgttccaacgggcctaagaacatttcatacagacgaagtgtgtcagcaccatatttctcgacaatcatatccggattgaccacattgaacatggatttcgacatcttttcaacagcccatccgcagatgtattttccatcttccaatacgaattccgcgtcgttatattccggacgccagtttttgaaggcttcgatatccagtatatcgtttgatacgatatttacgtctacatggataggagtgacttcgtactggtctttcaggttcagggatacgaatttgttcgtgccgttgatacggtatacgaagttggaacgtccttggatcataccttggttgatcagtttcttgaacggttcctcttcacaaacgatacctaagtcaaacaggaatttattccaaaaacggctgtagatcaggtgtccggtagcatgttcggtaccaccgatatacaggtctacgttgcgccagtattcatctacgtctttagcaaccaaagcttggtcgttgcgcgggtccatgtaacgcaggtaataggcggatgaaccggcgaatcccggcatcgtgcaaagttccagcgggaagatagtcttgttgtctattttggaaacttccgtgacttcctgttttacggtgtcccatgcccattttacggcgtgtcccagaggcggttcacctgtttcggtcggcaggaatttatctacttccggcaattccaacggcaacttgtctaccggcaacatctgaggcataccgtctgcatcgtaatagacagggaacggttcgccccagtaacgctggcggctgaagatagcgtcgcgcagacggtagttcacctttacacgtcctaacttatgttctgccacgtattttttggtggcggcgattgcttcttttacggtcagaccgttcaacgacaggtcgcaatgaggcgttacgtccggtctcggtgagttgcagacgattccttcttttgcatcgaaactttcttcgcttacgtcgcaaccttcgatcagcgggacaatcggcaagttgaaatgtttggcaaatgcatagtcgcgactgtcgtgtgccggaacagccatgatggcaccggttccgtaaccggccagtacgtagtcgctgatccagacaggcacggcgtcgcccgtgaacggattgattgcgtatgaaccgctgaatacaccggtaacggaacgatcagcgatacgttcacgctccgtacgttttttagtacggtccagataagcgtcgacttcctgtttctgctccggagtcgtcaattgtgcgaccagttcgctttcgggagccaagaccatgaaagtgacaccgaacatggtgtcggcacgggttgtaaagatggtaaattcgaggtcgctgtcttttactttgaattggatttcggcaccttcgctgcggccgatccagttacgctgtgtttctttcagcgagtctgtccagtcgatcgtctccagtccatccagaagccgttgtgcataggcggatacgcgcaggcaccactgacgcatgatcttttgttccaccggatagccaccacgttcggaaacgccgttcaccacttcgtcgttggccagtaccgtacccaatgcggcacaccagtttaccatcgtttcgcctcgataagcgatccggtagttcaacaggatttcctgtttttctttatcgtttttggctttccattcaccggcagtgaaatgcaattcttcgctgcaagctacattcaaaccttccgttccggactgttcgaaagcggcaaccagttcgctgatgggacgtgcctgctttttatcgttgcagtaatagctgttgaacatctggatgaatgcccattgcgtccatttataatattcgggatcgcaagtacggatctcgcggttccagtcgtaactgaaacctattttgtccatctgttcccgataacgggcgatgtttttctttgtcgtcacttcaggatgctgtccggtttggatagcatattgttctgccggcagtccgtaggcatcgtagcccatcggatgcaaaacgttgaagccttgcaggcgtttgtaacgggaataaatatcagaagcgatataaccgagtgggtggcctacatgtagtcctgctcctgacggataagggaacatgtccaaaacgtaatactttggtttgtcggtatttttttcgactttataaaccttattggcaatccagtattcgtgccactttttctcaatttctctgaaattgtactccatgatcgtctatcgtttattttatcgttttctatttaaagccacaaagttagtgaattttgtaatacataaagagttgaagcggcaaattgcaaggacgggcaaaataaaatttcatcctggaggttgtggatgtcaatctggaaattacaaaatgcaaaattttgaaaaagggaagagtattacaaccaatgccgatagaacccttaaaagaagtatgcgccgtaatttgcaacgatacaaattacggcgtgacgtgttaatcgagcttttgaaaaaagtcgggtttattcctgaaaaacaatggaagtaaatactccggggtagcagttggaactgttttaaaaagcaagaatcctactcaatgcaggattcttgccttgaaacaacgtctgttttttatttttaatttgaattataaatcattgattatgaattgataatagcaattatgttgtttctaatggttcaaatatactaaaatgaaagtaaatcacaacgcatggcttattgtagccagggcaaccacacaaaattcggaaatcgtatgaactatatcaaagaaaaaacagaaccttatcatataagtatttcccatttcctctgtcactgtgtcactgattcctttttaccaattgatattcaacttgtttgattagtgatatatgcccgttttctctatcactacggtatcacaaccctatcactgacaacttggatgggaaacaggtattccgcttatacatatctgtatattagtatattacaaataaaacaaacaataaacacttgattcccatccctgcaaaccactcgattattttatgtaaaaacggctataaaataggtgaaaccgggtagtttttattgtccggcacggtactttagttgccggacacccccatgttacccccttttacacccggatgtaccggctccctacacccggatgtaaaggatggcaacatgggggtgtttacggaattatctgcttgtttctgctaaaaaaagagaaggcttttgtggaatgaagaaccgtattttgtcaatttaatatctattatattcgtttttacatttatttattcgattattttatatgctttttcaaaagtaacagaaggtaatatgttggtttccaatcatatgataaaaatgtcctgtttcaggagtgatagaggcagtgatacaggaaaacatcctgtatcactgctataacgcttgaatatcaatatctgaaacttttgtagtgatagagtgataaaaggcatttacattgtgaaattaaccaatgtcggaaatacgaaagttattaaggtaaatgtatactaatccatatttagtattgaatgagaaagggcgtccacgaggatgcccttttttgtttcttttcgtttcctgacagtccggtatcccctccctgcttatgccaaaaaagaaactctcttcttttcactctctttttaatttatattttgatcaatatgaggttatgcctcattctattattttgagaaaacagcctatataggacgcagtcccatgctatgttaatttatctcatccggccacgggcaagcctttcctgtcgccttgaaagatggccgttgggcatctactttacggaggtggtcgccgagttctttggagaggcgtttgacgatttccgggtgacgggtgctaaggtcgttcttttcgccgatatcgtcggagatgttgaacagttctttcttgccggtaccgtaatagtaaatcagtttccagtcgccattgcggaccgcacagttgaagttgatgcccggaccgtcgttgccccagttgttcggcatattccagaagagggaacgccctttggaaggatcgcccgtcccggtgagcagaggaacgaagctgatgccgtcgataggttgcaccgtctcgtagtccttcactccggccatttccaggatagtcgggtagaagtcttctatcggcaggtatttgtcgcaacgggtattcggttgggctactcccggccaactgacgatcatcggttcgcggatacccccttcgcaaagggaacctttgccgctcagcaacggatagttctgcgtgtacaacgggccgtcacgccattcggacgtagaggcaaggccgccgttatcgctcatgaagaggatgatcgtattgtctgcctccccgttcttttccaaccagtccatcagatcgcccaggctcttgtccatcccttcgattagggtggcgtaggctgcctcatggtctgtcattcccttctttttgtatttctcgtagaagcgcatgtccttattcagtggaatatggatggcatagtgggacatgtagaggtagaacggctggttgtatttcttcgccttgtcgagcgccttgatcgcctccaatgtcaaggcttcggtagcgaatgtttccgtgccccaatacttttcgaggccggggatggacatcagcgaagtcggtttgccatccttcgtatggccgtaattctcttcgcctaaatagcttgccagaccgccggcggcatgaccggcaatgttgacttcgaatccccagtggtgcgggtcctctcccggagtgtcgatcgcgccgaaatgggctttcccgcagtggatcgtatgataaccgctatttttcaagagctggacgaaagaagtcccgacgaaggtattgtttgttcccgtaacctgactgacgccgttatagttccagtccggtatgtcgagcagactgtctttgcggtcggtcgtcttatccttttgcagcgtccagttggtgacacggtggcgggcggcattcgtcccggtgatcaggctgcaacgagacggggaactgatactgctggcataggcctgggtgaacatgactccctggcgggcgaggcgttccatgttgggcgtctcgtagacttcgttataatgcgtcttttctgtccagaaaggcagggaagtgtcttcccatcccatatcgtcaaccataaagaggatgatgttcggccgcttggcaggctggtcggctgcctgcatatttcctgtctggaaagcgggcaggattactaaaggcaataagattcgtttgtccatcttgtttgtgtttttcggtttatattcctgtgaaagttactgatatgacaaagatacatattgattcggaatattttttacaataggaggacagactgaatcttttatctggaattatgtatctaatactaccaattcatagttcttgcttccgagtccgatcgtctcggcataatcaaccgtgtgacgtccatgaaggctttcaatgcgattgaccaacggtctattgtcgttgccttcggttggctttacagcatatactaaatctagacaagcctgatccagagctacggggtcggttgaagcaagtattccgatgtctttcatttcgggatcatgagggttggaatcgcaatcgcagtcaattgaaagattattcattacattaatatataaaatattatcaccgaaataatctgctacactttgcgccgaagctgccattgattcgaggaaagcatcttgttcgggtaggttattccataattcggcagtctctgctgttttaccggccgtatgaatataggttttgcctttagaagaggcgacaccgatggactgatttttgattacacctccgaatccacccattgcatgtcctttgaaatgcgccaggttaatcatgaaatcatagttcttcagatgggttccgacgatgttatattggatatgttttttatcttttaccggaatattgaattcaccttcagaatccatgatgtcgacctttgctatgtcgaagaaaccatggtctttaactgcttggatatgctcttctgtcgtaaagcgttttccgacataggccgtattgcattctactattgtcccgcttactttctgcactaagtctttgatcagagacggctgcaggaaattatgtccgcccggttcgcctgtactgattttgatggcaactcgtccggatgctttacgcttgagtgcttcgtatattttgaccaaagcatcgggagagatctcttttgtcatcaggacttttgatctattttggtttgttcctcctttaagagggatgacggcgggcacgatattgcccttcaaatgaattggcagactggaagctgctgctaaggatgctaatgtagtcaatgtagacctcatccaggaccttcttgtcattttctcttccatataaatctttccttttaattatttcttcaaaagtagtggacaagatttaattgtgtaatacctgaattacggataaatatacctttattactgcatgtgttgttcgagttgtcgcttattcttccttcaactcaaatttccggaaactaaggatatcgtcattgaaccggggattcaggtaatggctgtcggaaatatataatccttcgaggcggatcagcatgattttaggattataggtattgtcgggaaagagggtttcgccgagaatacggaaatctttatcgagaataataatgctgaagttcttacgcccgaattgtacgagttccataggacggacgcctttatccaaagtcgagggcggataagcaatccggtaataaacctcccggtagggatcgtacagcaagttattataccaggcattcacacagaagtcttcggggcttgctgtcaactcgtccggcagttgtactttgtcgaagtacttacttttaaccgagactttccgtatcgagtcgtgttcaggagtagccacatagatattctcgtcatagtggaacgagtaaatgaagcgttggccgtcatagcaacgactgtaactggcttccatgccgtatcgtttcagcttgacttccgaaccgggataatcgggataatcgaagggcagtttcttttcctctttcgtattcatattgattgcgacggaaacagggtcatgctcaatcaggcgatttggttctatgcaggtatatagagtgtgttcgatacgtacaggtaattgtgaggctgtagccataaaacaagaaggttttaatccaggaaaaggctgcttatcaagaaggtcgcagttcttattaatcaagtatagcccactttcgtaaaaattgaagacgtaaatactgtcgagattctgaatgtaataaccgaatatccttccaacaccgttacttccttcctgtgaaggggttatcctgaacgccggtttctgctgtttcaggtcatagaagtggatcgtattgttttcaatattctggaaagtgaaatactcttttccgtctttgtctttatagactgaataaatgttgaagttgtttttcgtgtccgaatcgattgggaaagacagcgtttcgtctgtctctttcaattcgcatgctccgtactttttgtgcgttgaacaggagataaacaggaataaaaagaatagtaatagatggtgctttttcatgttcataataaattataaggaaaggaagaaaattaaaaactccttgttcccgtgcctcgtgtgggagagtgcgggaacaaggtgattttgacatgctttttccgggcttttaatctttctttaacggcggatagtcgatcgtatagtgcaacccgcgactttccttacgttccattgcctgacgggtgatcaggtaaccgacgttgatcatgttacgcagttcacacagttctttggaggccttgcaacgtttgaagaggctttccgtctcttcgtacaggatgtccaggcggttccaggcgcgggtcaggcgggtattactgcggacgatgccgacataagattccatgatctggttcacttctttcatgctttgggtgatcagtacgcgttcttcggtagagatcgtaccttcgtcgttccattcggggatgtcggtattgaagtcgtagcgttcgaggacgcttaggatatgtttagctgctgcatccgcatatacgactgcttcgatcaacgagttggaagccaagcgatttccaccgtgtaaccctgtgcaggaacattcgccgatggcatagagacgacggatgctggattgcccgttcagatcgacactaataccgccgcacagataatgggctgctggagctaccgggatataatccttcgtgatgtcgatgccgatgctgaggcattttttatagatattggggaaatgcttcttcgtctcctccgggtctttatgggtcacatccaagtaaacgtgatcttcacctcggagtttcatctcgttatcgatcgcacgtgctacgatgtcacgcggggcgagagacagacgtttgtcgtatttttgcatgaactcttttccgtccagcgtacgtaagacgccgccatatccgcgcatggcttcggtgatcagaaaacagggacggtctcccgggtggaaaagagcggtcgggtggaactggatgaactccatgtttttgacagctcctttcgcgcgatacaccattgcgataccgtcgcccgtagcgatcagcgggttggttgtgttgcgataaacagcttcgcaaccgcctgttgccataactgttaccttggacaggaacgtgtctaccttaccggtgtcttcgttcagcacataagcgccgtaacatttgatgcccggcgtatgacgggtgacgatgatacccaagtgatgctgcgtgatgatctctactgcaaagtgatggttgaatatcgtgatgttgggatgtctcttgatcgcttcgataaggcttagttggatctcggcgccggtgttgtccttgtgatgtaggatgcggaattcggaatgccctccttcgcggtgaagatcgaactcgccgttctccttcttgtcgaagttcacaccccaacttatgagttccttgatctgatccggtgcgcctcgtacgaccatttccacggcttcccggtcgttgatccagtcgccggcaatcattgtgtcttcaatatgcttgtcgaaattgtctaccagcaggtttgttaccgaagcaatgcctccctgcgcgaaataggtgttcgcttcttccagctctgtcttgcagatgatggctactttccctttatcggctaccttcaaggcgaggctcatgccagcgataccggaaccgatcactaagaaatcgaattgttgtaccatagtttatatcctttgtggctgacaaagttaggaattaacttatttagttgtaccttatacagcccgctttcgtgcaaaatagtccgcattactgattctttggatattttaaacttctcgtcgtaaacatctcagaatggaaccctgttctattggggcattggatatcctgctaattattaacacttaaacgttttaaaatatgaaatctaaagttgtattgaatgctctggccttgttgtttgcggctggtgcgatggctcaggattgtacgttctttttcccgcagaccaaaggtacgcagctcgtaaaaaaaggctatgatgcaaaaggaaacctgcagagtgtgatgacctacacggtcgatgaagtgaagaacatcccgtccggcctggaagtggaagccgattatgtgttcaaaaatagcgcaggtacggtttatgacaagggtgacctggaagcattctgccgagatggtgagttctttatcgagatgaaggagactttgtcaaatccgtctttcgtgtcgactatccagtctgatttggctgctaccgaagcagtcattaactatccgagtgtatcgaacgctccgtccaataatggcgacgatatgtatttcgatgatgcaaccattcagatctactcgaagaagaatcggaaggatcgcaaaaacgtgtctatctacgaccgcgaatatgtgacgaccgaacaggtagcgactcccgccggcacgttcgactgcacgaaagtaaaatataaaatcaaatcccgctccccgaaggaaacgatcgagggctatggatatgaatggtacgctccgaatgtgggtgtcgtaaagaacgaacagtataataacaacaatcagttgcaatattatactgtcctcgaagttgtaaagtaatgtaagatatattcctttttgggaattgtttgaccggtttaagtggatgcgttgttactgagaagttgcagcgcattttcttttccctgaatcgccaaaagaaataaaatgattatctttcggcaaaattcaggatatggacagagtctttaaatcgaaagtaggttggtggtatcatctgatactgttggtgatggcgacaagcactgttgctgcatttgtgggcggcaagtctcccgtaacgatgatcgtgctgctgttgtttacattggagtgtattcacatgctgttgtcgacctggtataaaataacggcggatggttatctgattgcccattgcagtatctttccggagaaaaagatttctatctcggagattagtgccgtcgaggtgacagtgatgcctgtctcgagctacgccctgtcactggaccgtctgatcatctacaaaggcgacacgcagtggctattgatttcgccggtcaacaagcaggacttcgtcaagctgttgaagaagcataatcccgatatccggataaaggaaccggttatctaaaacttaaaaacagattaccatgaaagcacggattcggaaaaaccagaaagattggcatgtatacatcttctggattttattaggagtatttgcattgttggttattatggatgctttcagcgaggacaaatttgatcgactacccttgatcctttgtttcctgccgttaactatacttcagttacgtccgtatcagataacggatagggacatgttgcacggaaacgggcaaatcgacgtgaaactgatctcccggctcgaaagcaacggaaacaaggtcattgtttattactctcgtatggaaggaggtatcgaaaggcgctcctctttttatccggctgacaaggatgaatttatctcgatattacaacaaattaatcccaatataaaacttaattaaatctgagaacatgaaatacgatgttgccataatcgggggcggtcctgccggttatacggctgccgagaaggcggctgcgggtggcttgtccaccgtgctttttgagaagaacgcgttaggcggtgtgtgcctgaatgaaggatgcgtgccgacaaagactttgctttattctgcgaaagtgtttgatacgatcaaacacgcccccaaatatgcggtaagtgcggagaatcctgctttcgatttcccgaagatcatcgctcgtaaaaataaagtcgtaaagaaactgacagccggcatccgcatgaagatgaaggagaacggcgtggaagtggtgagcggcgaagccgaaatcaaagggcgggcagctgacggaacgatcactatcgcctcgggcgaagctgtttatgaagccgccaacctgcttatctgcaccggttcggaaactgtcataccccccattcccggattggcggaaacggagtattggacaagccgtgaggcgttgctgtccaaagaactgccggcttcgctggtgatcatcggcggcggtgtgatcggcatggagttcgcctccttcttcaatagcatgggaacggaagtgcatgtggtcgagatgctggataagattcttggtccgatggatagggagctgtccgagatgttgcaggccgaatatgccaaacggggcgtcaagttctatttaggacataaggtgactgccgtaaacggcggcgatgtgacggtcgagaaagacggcgagacatcagtcatccaatgcgaaaaaatcctgttgagcgtaggccgtcgtcccgtgaccaaaggtttcggcttggaaacactggcccccgaacctttccgcaacgggatcaaagtgaacggatttatgcagacttccgtcccgaatgtgtatgcctgcggcgatatcaccgctttctccctgttggcccatacggctgtcagcgaagcagaagtggctgtcgatcatattttaggcaagaaccgcagcatgagctacaaggccattccgggcgttgtctataccaatcccgaaatcgcaggcgttggcaagaccgaagaggaactgcaggccgaaggcacgccctacaccgtcaagaagataccgatggcgttctccggccgctttgtcgctgaaaacgagcagggcaacggcgtctgcaagctgattttggctgaagacgaaacgatcatcggcgcccaccttttgggaaatccggcctccgagctgatcgtcatagccgggatcgctgtcgaaaaaggcatgaaggcctccgagctgaagtccatcgtcttcccacatccgaccgtaggcgagatccttaaggaagcgctctgatattttattccccatacatgcccgatcccgatccatcccggcgactgttcgatggatcgggatctttttgttgaaagtcctgctttaatcaacctgaagtgtggaatgttttatctgtttccatgaggtgaaaataacttttctcgccagtgaaaatttgttttctatgggaagaaacaaaagattcatgccaatggaacaaaatttccccctctatgaaactgctccgaaacgggtagccgttcgtccttaccaggataggagttggtttcatttagctgatgtttcttcgaaaatatccttataagatgctgaaaatgctacaggttaccaaaaaaatcatttactttgcaaacttaataatgtgccaatgcacaaaaatggcacattggcacattaattaattggcaaattattattatggcacaagaagatgtatttaagaaattagtttcgcactgtaaagaatacgggtttgtattcccctcttcagagatttatgacggtttaggagcagtgtacgattatgggcagtatggcgtagagttgaaaaataacataaagaaatactggtgggacagcatgacgttgttgcacgaaaatgtagtcggcatcgattcggctatctttatgcaccctactatctggaaggcatccggccatgtcgacgcgttcaatgaccctctgatcgataacaaggattccaagaaacgctatcgtgccgatgtactgatcgaagatcacctggcgaagatcgaggagaagataaataaggaagtggccaaggctgcgaagaagtttggtgatgctttcgatgaagcccagttccgcgcgacaaacggacgcgtgctcgaataccaagcgaaatggaatgagatccacgaacgctactcgaaagacatgaatgattccaatttcgaagacctgcgccagctgatcctggattgcgaaatcgtttgcccgatctccggaacccgtaactggaccgatgtccgccagttcaatttgatgttctctacggagatgggttctacttcagacggtgccatgaaagtatatctgcggccggaaacagcacagggtattttcgtcaacttcctgaacgtacagaagaccggccgcatgaaaatacctttcggtatcgctcagatcggtaaggctttccgtaacgagatcgttgcccgtcagttcatcttccgtatgcgcgagttcgaacagatggaaatgcagttcttcgttcgtcctggcgaagagatggaatggttcaagcagtggaaggctactcgtctgaaatggcaccaggcaatgggattgggtaatgaaaaatatcgttatcacgatcacgaaaagctggcccactatgcaaatgcggctactgatatcgaattcgaaatgccgttcggtttcaaggaagtggaaggtatccatagccgtacgaatttcgacttgagccagcacgaaaagttttccggcaagaaaatccagtatttcgaccctgaactgaaccagagctatactccgtatgtaatcgagacctctatcggtgtagaccgcgtgttcttgagtgtgatggccggttcttattgcgaagagacattggaaaacggcgaaacacgtgttgtattgaagttgcccgcagcgttggcgcctatcaagctcgccgtattgccgttggtgaagaaagacggtttgcctgaaaaggctgaggagatcatgaagatgttgcgtttcgatttccgttgccagtatgacgaaaaagattctatcggcaagcgctatcgtcgccaggatgctatcggaaccccgtactgtattacagttgaccacgatactttgaaggataattgtgtcacgatccgtttccgcgatacgatggaacaggaacgtgtgagcatcgacaagttgcatgacattatctccgaaaaggtaagcatgaagaatttattaaaaaagataatggaataaacgcatgaagaaatacctgcatatcgcgttgatgttgttgtgtgtcttcgttgtctcttcttgcaaggatgatgacgatgatactgaagctgttgaaagagaggcttataagttggaacaggacattgccttccaggcaaaagtaaatgaaaccggttttgtaagatggtattcggaagccggtgatggttatgtttgtgccaaactgattgaaaaggggaatggcaagcaagcctatttcaatagccgtgtctcggtctactataaaggttctttgacagatggaacggagtttgatgcccggttgtttgaagacggtacgcccttcaagtgtgcggtcagttcatactatgcgaattattcgaactccaatccgaatggatatggttccgtcatatctggttggacagttgctttgcaacatatggttgaaggagataaatatgaggtttggattccgcagcagctagcctatggcgcaagcgacaacggtgatatcccggcttattcgactttgatattcgaaatcgagctggtatcggtggatgagcaggcagcttcggcaagttaaaagttgatttataaaagaataaaaagggggtggctatacaatgtgtaggcaacccctttctactttttatttcttctgtttcaatatcctctgtgcacagtccgagaacactacgatcgccccggcaatgattgccgtatcttttattactagtctgcctgccccggtcagcagtgggaatccatgttctccgcttcccaagtccggtacccatacttcaggcgtcgtcaccaggaaagagagcgttccgatcgtcatgataatagcaagtcctgcacctaccaggccgattttaggggagaaaatacctaagaacgtcaggataccgatcgccatgatcagaatgcctaacccgtgcgagaagccgtacgtgttgttttccacatgccactgatgtttggcctcgttgaattccccctctttcagtttatattctttatattcgggagcgcttttcgtatagaagaagctcataaaaggactgtttgccacaaacggcacgataccttctgcttcatagttatagaatttcaatcctccgatccatacgaagatgatcaggattgccacgcggatcaagttaatgcccaacttttgagtcgaagctgcaatgttcaggaaagtgtaaaatagattacttaatttagtcgtcatgtctttgctgttttatatgtttgttttataatgcaaatatcggcccattgtggcttgcggtaaatggcaattctgccggataacttatcaattttccccgatctggttatttataggcaaaagaaacccctataaacaattaaaggctgtctcacgacaacccctaaccaaactttgttaaccttaaatctaatactattatgaaaaaaccataatacaaagatacgggtttgtccgaacttgtcaagagccaagatgctaaatagtgttgtaagaggtataagaaaaattaattgcagatgaataagccttttattgaaaataaaattatctttgtctggaaatataaagaaaaacgtagaagcgtttcgtattattctttgttaggaatctggtaaattcattgtacaaaaagaataataggcaaaaacgctcgcgctcccatagggcgtgggctattgcttatttgttgtacaagcttaccagagctcctaaccggatgagacaatagctccacgcttttttaccacaaatagaaagaatacgatatgatggaagcgaaaattgacattgaaaaagtcaggaaaggagatcatgctgcttttaaaactttctttgaatgtttctatcctaaattgatggcgctcgcttgtcgttttgtagatgagcaggttgccaaagatttggtgcaagaagtcttcacttcctattgggaacagaaaaaggttatacaacccgacaatatccaatctttcctttttaaatggctgcaaaatagttgcttgaaccacatcaaacaccagatggttgttgacgagtacgaatcacgtgttcgcatcgctgaggcgcgtatcgctttttggggcgagtccaccgactccaacgatgtccttaggtctgttattaatcaggatttgcgggaaatcatagaactctccgttaataaactgcctcccaaatgcgcacaggctttccgtctggcctatttccatgatatgagccgtaaggagatagccgagattatgggaatttctccccgtacagtcgaaggacatatccggcaagcgcttgccttcctgcgggaaggcttgaaaggccttttcctgcttatttttctgctctgcaacataaattgaatttttctttgtttttgaccacgtagtacctcccgcctcgattgtcttctttatataagcacaatagaagaagatggacgaacaattactcatacgattccttacgcatacctgtactccggaagaccttcgctcgatcgaccaatggatcgcatccggcaagcccaatgcagactggctgttcgaaatggaacgcatatggagtttgaaggatgaactgcgattctcggataggagagagatagaggaggcgtataatcgttttactctttccctgggaaagagtaaaaatgcgaaaccgcatttttacatatatccgatattgaaatatgtggcagctgttatcatcatcggattattaggattgaatctttataaaatggttcaaccggcaactgtaggcgagaatacggtagaagtgccgaaaggacaaagagcatctctaatgctttccgatggaacaaagatctggttgaattcccaaagtaaacttatttacccgactcaattctctgataaggaaaggaatgtccggcttgaaggggaggctttttttgatgtggcccataaggaacatcttccttttgtcgtgcattcccctttgctggcaataaaggtattgggaacgaaatttaatgtaaaagcttacttcgacgaaaaatccgttgtcacattggcagagggaaaggttgaagtggaaacaaacgactgtaaaaacagattgactcttaaaccaaacgaacaggtttcatattcgggaagttccggtttggcattggagaaaaatatcaatacgaatacggttaaattatggatgaaaggagaaggcgcttttatccaatgtcggcttgatcatattgtccgtgatttggaacggaaatttgatgtgaaaatagttataacggatcattctttaagttctgaagtttttacttgccgctttaaggatacagctacaattgaacaggttttacatttactgaaagaaaccaggagattggattatttatttgaaggggaacaaatacggattttcaaaccattaaaataaaaagcctatgggaaaggattgataaaaacgaaggctgaagataggccaatatcttcagccgggattaagcgagtaacgctttagcgaacctaaatttattactaactaatcatttacaaatgtatgcattatattatgaaaaatacgccatgcggtgtatataaatcgtcatggctgcgaaaaagtctaaatattatgagatgtgttatattattcatactattgggaaccttacagtcttttgctaatttaagctattcacagtcggtgaaattgtcattgaatatggaaaatacgaccgtacaggaggttctcactactattgaacaaaaaagcggtttctatttcacgtataatttggaacaggtaaaagtaactcgtaaggttactgtcaactttaaggataagacagttcccgaagtattggatgaactatttgcaaaagagaatatccattatgtgataaacgacaagcatattgccttatataaaggaaacgaaaggcaagttgctttacaagcaaagaaagatataaaaggtgtggtaacggataaaaacggagaaccgatccccggcgccaatatcattgagaaaggaaatcctaccaatggaactattaccgacgtcgatggaaattacactttgtccgtattcggaaattccgtgttggtagcttcttacataggatataatagaattgaaattcaggttaagaaccgttctgtggtcgatattacattatcggaggatacgcaagcattggaagaggttgttgtcgttggctatagtacccagaagaaagtaaacctgaccggctcggtctccactgttaatttcgaatcaatgtcatcgagacccgtcaccgatgcctctcaagctcttagcggtgcttcacccggccttcagatcatgcaaagttccggacaacctaatgcagagagtttttcctataacattcgcggtgtgggaacattgaattcttccagccctcttattcttgttgatggaatggaacaaagcatcagtatggtcaatccttctgatatagccaatgtctctatccttaaagatgcagcttcttgtgccatatatggaaaccgtggtgctaacggtgttatccttatcacgaccaaaagcggcacggaaggtaaaattagtgtgacgtatgatggtacagtctcctataatgaacctttcaaaattgttcatacaatttcggattatgttcagtatatgaaattgatgaatgaatcatctaataacttgggaaactctgatatcttttctcagagttctattgatctttgggaagccgctaaagctgatcctaacggaatttctgcttcgggttatccgaactatgttgcttatcccaatacagactggtgggatgagatttatacgaagcaatggatgcagaagcacacgatttcactcaatgggaaggagaagaaaacaggttattcaatgagcttttcctatatagataatccgggtatcatgaagaatacgggatataatcgttatatgggacgtgtgaacttgtattctgatattaccgactggttgcgggttggaactcgtacatcgggaaatgttaccgatcaagaagtcagtgttaccagttataatgggagtagtcatatcaattctatgaacacggaaaagatggttccttgtatatatccgtattatgatggaaaatatggtgcaccggaaggacctgaagaagatccacaatcgcataatggactttgggataatgtattgaatgggtttgacaaatattcgcaactttatacggagtggtatgctcaagtcaagtttctgaagtattttacatataattttgatttttattatcaggatcttcgccgggagcgaaaagtatcggacgcttccattggaaagttcagtttttctaagggagcttattcaacaggggccgatgacccatcaactctttatactcgtatgtattatacaaggacgaatcgtacgaagttgaaccatttacttaattataaccagtcttttggtattcatgatgtgtcggcaatggttggctatgaggaagaaacgtatgattacagggagacgaatgtgagtaagctgggacttacagatgccgctgtaaatgaccttgatgccgctacaacaccttattcgacggctggttatgggactgaatatgctgcccgttcggtgttcggacgtgcgaattatgcttataagagcagatatttgcttgagtttaacttgcgctatgatggctcgtcgagattttctcctgattatcgttggggagctttcccttctttttcggccggttggcgtatgaatgaggagttgtggcttaaaccagtacagtggctgacaaacttaaagcttcgtgcttcttggggtaagttgggtaataatgcaatcggtaactatgattggcagtctgtatattcggcagcaaattattctaccggtcaagctttgacaagtggtatcgccatcacttctattgccaatgccgctcttacttgggaagagacagctgttaccaatgtcggtcttgattttggtttctttgataataaattacatggtaatatagatgtttataataagttgactaccggaattctgtacactcctgatatgtatatggtaatgggaaatgcgactgctccgaaagcgaatattgcggaagttacgaataggggtgttgaattggagctcggatggagagataatatcggcagggatttcagctatagcattaaaggtcagttttcttttaataaaaattttgtcagcaaatataaaggtaaattggaaaaaggatggaataagggacatacggaatattctactaatataggagatgtttctactggtagtactacgagagttatcgaaggacgtcagattaatgagttttatcttcctaacgtttataacggtaacggttcatatttcaatgcggacggtacagtcaatataaatggtggtcctaaagatggtatgatccgtacggaaaacgatatgcaatggcttcaagccatgcaagcggcaggttatactttccaaccttataataatattgctaaaaatgcactttggtatggcgagtatatttatgcggatgcgaatggggatggagtttatggtaattcatatgattctgaatttcagggaacttcaacaacccctaaatataattttggtatccaggccagtgcaaattggaaagatttcgatttttctatgacttggggaggatctgctggatttagtatttattactatggtaaggcaaggaattcaagtgaaacgacttatggttatgcaattccggatgcggtagcgaatgatcattatttctatgatcctgaaaatccatcagatccgagaaccaatctgtcttcaaaacaacctcgtttggtcaatgtgtcaggggctcagagttcagcaagttcttcgcttcatctggaaaaagggaatttcattaaacttagaaatttgactttaggatatacaatgcctaaaagcatttctaaaaagttctatgttgaaaggcttcgcgtatatgcttcgggggagaatctgtttgcgattaccggcttctccggtatggatccggaaatgcgtgttagtatgggatattctaccatgcgtcagtatgccttcggtattaatctaacattttaattattttggaaacagctaatatattgagaatatgaaaaaattatttagaaaaatagctatcatcggaactttatcgggcatgttattcggtttggaagggtgtaccggcgatcttcttgatacatctccaagttatagtttctcgagttcgaatgtatggaccagccctatcttggcccgtgcggctgtgatgggggtttataatgaactgtatgagaaattctctaagaattacgatagtccttctatcggtattccgtttgatgcctggtcgtccgtaatggatatcgatatgaactggaagaataattgtttcgtgatttccggttcttgtacgccttcgaatggaaatgtaggtaatcattataaatattattatacggttgtgtatagggctaatgatgttatcaacaacattgataatgtcccggaaatggatgacagcgagaaagcacgattgaaagccgaatgtaaatttctgcgggcttgggcatattatcatttgaatgtcttgtggagaggtgttcctatctatatggaaaatgtggagagttcggaagcaaccaaagcgcgttcatcggaagctgaggtatgggagcaaattctttcagatcttacggattgtattaatgagcctaatcttcctggtaaatatgctcaaggtaatagtagttatggacgtataacaaaaggtgctgcttatgcttttagaggttatacttatcagtttatgggagattatgctaaggctcttgcagactttgaagcgattgaagggcttggatatgcactttacagtccgagtaatggcgtaaaaggaaacagagatttctttcagctctttaaaccggctaatgagcaatgtgatgagatgattttttcagtacagtgtgttgagacaagtgggatgggaaacccgagaggaatcaattatggtaatcgttgtacgggtggttctgcttggaacaattatctcccgaatcctgcttttgtggaaatgtacgagtgtgcggatggctccgaatttgattgggaaaaatattgtcccggatggcattcgatgactccccaggaaagggttgctttctttctgcgtgacggacttcaatccggtaaaggagagtggggaacaactgaagcaacttctaattatcaggctctttataataatatggtttcttatggtgccgatatgagcaaatatttggatcaagggaacgaggcgagaatacgccaggcatatgaagatcgtgatccgcgcctgatgcagtcgattataactccttactcgacttacgacgggaatcaggcaggtgtgggaaatcatacctggaccctccgttggccgtacattctggatgctggagagccttatgacatccgtactgatacaaattctaaattttattatctttggaggaaatatgtaacagagaatgatgaatgtacgactcgttgggtctattccgaagatattatactctgccgttatgctgaaattcttcttaggcgggctgaatgcttgaatgagctgggcaggacaagtgaggctgttgcttttgtaaatagggtaagacagcgtgtcgggcatgttcttcttaatgatcaggcttatcctgcgactattgtgagcgggcaggaggatatgcggcaacgcattcggaaagagttttatgttgaacttggcggtgaggattctatgttctttaacgagcttcgctggggtacatggtacgacaggaagtttaaagatcattcttccggacaggtaggagaacttaatacgaatggtttgatgcagatttggggagagactacttacaagcatcttagcgttggtgaacagataaagatttggccgatccctgcaaaggaaagggagatgaactcaaatcttacgcagaatccaggctggcaggattagtctgcaaaatgtgaataacgaaaataaggggtataaaatgaaaggttttatacctcttatcttaaatcaagattatatttttacatcatataaaagaaccatatcatgaaacgaagagcatttctaacaattagtgcaacatcacttgccggtttggcatttggaaaccgattgtcctctttctctgaatcgaacttggagaaaaaatattcgatcgtattgttaggcgatacacactttgatacggaaccggccagtgtgtatcatgcagactataatgaaccggtagaatggttgaaccgggtacaacgtgctgaatttgctcgtaatggggagatgtggcgggagcgttgccctttgttactaaaacgggctgcccaactgattggttctgataccaaaatggtatttcaattgggcgacttgattcaaggagattgcggtaatccggaggtccacaagaaaatgttagaggacgtgatgaaccgttttaagtcagaacttcatggtttgccttttgtgactgtaacgggtaatcatgatatccgcggaacgaacgcaaaagaggcttatcatgcctatatgccggaacggatgtctgaggaattgggaaagtccattacgcatacgaacttttttttcacgatcggcgatgatgcatatattgtactggatttcaatgatccggatgatacactcattgatcagatgctaaaagagtgtgaaggagcccgacatacattcgtattgacccacggtccggttctgccctatgacggaggaagttgccgatggttcttccacgggggaaagtcggctgaagagactgctgcgcgtagacattttcgtaaagtatttgcccagcggaacgctttgtgtatctgtggacacattcatacgacagaattggctgattggtatggggatggtggtcgcattacacaaatgacggttaatagcgtctggtctaaaccggaattaggaacctattcttgtacgtcggatcagccgcgggattacggtgatattcacgaaatggctaaatccaagaaaaaagaggatggatccaaatatgaggatgacagtgggctgttgaatgaatataagctaggtttgaaaacctatatccgttcgacttcggctggctcttataaaatgaatgtttctgatcggcatgtgactatcgatttctacgctggtaattcacagaagattagtaaacatttcgtgttgaggtgataaacgcgtactcatccggatatggctttattgaatgtgacacgaaagtagggtgaaatttcacgagcgaaaagtaaataattattcaaatgagaaagagtgtatttttattgtcattgtttgttttgccattgtatatgttgttacaagcgcaggaaaaaacgacacctttttggggtaagcaggaagtgtatctgattaatcaaactgaaaaaacttttcatctggtagatgctctcttaaaagagaaccttccttcttccggtaatccggcattggctcgtaaagcagcattgcaattattggatggtatattccatgatacgtgtttggatggtagtgaaacgctttcgcggtttatggaatctcgtttgagcggacttttggaagacatgcagaaacctttggaagagggtatgaaagtgtataaactctataatgacgggtttatcgtaaagacaaaaagtgtcactgtcgcttttgacttgtaccgtgggggagcgatgaagaaatctccttctttgatttcggataaaacgatgcaagctattgttgcccggtgcgacattatgttcctttctcataatcatccggaccatatagatccggttgtcgtaaagatgtttacagatatgggaaaacaggtgattgctccgaacaatagtttggtaggaaatgaattggtgacccacattcgttcagagcagattatcgatagggaatttaaaacagaggggggcaagctggatgtaaaaatattgccggggcatcaaagtgaactgattaacaatatccatgtagtgacgactcctgaaggttttactttcgcacagacaggtgaccaatataataaagaggacttgacgtggttattggatgtgaaaacaaaaattcctgcattggatgttttgctgatcaattgttgggcgaatcgtttgtccgatacgattgaagggttcgatccaaaactcgtgattacggggcatgaaaatgaattaggacatacgattgatcatcgtgagtcctattggacttcatttattaaattggaagacgttaaaaagcccagttgcttaatgacgtggggagaggtctattggtataaacgatagcctgatcttctattaaatatcatccggatttctgaatacgcaggaagatgagatacacggtttttcattaagcaggaacaacttgatacatgacacattattctgattacgatagtgcgtaggcatacagatccgggaatatctttttaagatggatatcccccttctggaaaggcttacatattcaaggacaaaaacgtacatctttgttctctgatatgtaagtcttttgttttctagaatgggatatattatttctttttgtccccctctataggtggatttgttttttttcgttacattagcacctgtttttaataactcagttaatgattaagaattaataccttatgaaacacattcttttacttctcttatcgttctttgtacccgtggtatgggggcagcaggtagaacagttcaagctctggccggataagccggaagcgggcgaggcggaaatctttgtttatcatccggcgaagggcgggaaagcggcgccggcggtgctgatatgtccgggtggcggatatagagggctggcgatgaatcatgaagggcatgatatggcgaaatggtacgcttcgaatgggtttgttgcagtcgttttgaaatacaggatgccggaaggtgtacatacgatcccgctgagcgatgcggagaaagcgatgtctgttattcggggcaatgcagccaaatggaacctggatgcgaataaggtcggagtgatcggctcgtcggcaggcggacatttggcagcttcactcagtacgcttgcagcagatgccaaccggccggactttgcaatcctttattatccggtgatcagcttcgataatatgacgacacatggcggttccaagaagaaccttttaggtacagatatcgagaataaggagttggtagaccgctattccttgcagaaacaggtggatgataagacaccgaagactttgcttctgctgagcgatgacgatcagaccgttccgccgttgaactctatcctttattatacggcgctgaatgaacaccatatcccggcttctctctatatgttccccagtggaggacacggttggggattccggtatgacttcacctactatcaggaagtgaaagacctgatacagaaatggcttacctacataaaaatcactgattaatctaccgatatcatgaaaccgattacgctattgctggcagcaggttccctgctgctgagtgcacaaggactttccgcacagacggacggttccgggaaaaaggaatattggaatgcaaataccctcttgatcccttatcggctgccacctgctcccgcagggtataagcctacctatatagacttggatggtgacggtgatccggatatcctgcgtacggtgacggccaacggtattccggtgcaatggatcgatgacgacgacgatatgcagtacggcgatctggagggcgataccgataacgactgcctgatgatagaccgtaataaggacggtgtctacggtggttacggtgaccttatcatcgactgggtgggcgaagatgaagacggtaatccggccatgcaggtcgtagtcgacaatatccccgaagcaaatcggatgaagaccggcaacgggcattatatgtgggtggtggatacggacaaggacgacgtgttcaactatatcgactggaacacgttcaccctccgctgttggatacataacggcctgtcggatttctacgaagattataacgggaagagcactttcatgaagatacacagcacgaccgaacgtgtgaacgatgtccgtatgaactgggaaaaccctttcctgttctatgatcccgacaatgacgggctgacagagatggcgatccgtttctgcgactctcccaagatcgtgaaagagaacggacaggcaaattccgtcctctcaggtaatatcgactgggtttccgtttcgatggatacggataacgacaatgcgccgggcaatgagttcgatttcgatatgaccatccattttacaggtcccggcttcaactacgaaaaccagaaacatatcaacaagaacctgcgcggacttcccgaagccgatacattcttcctcgatgcccgttggcgtaaacttccggaactgttatatccggatcatgacgctgcttgggatttgacgttcaaggaaggtaaatgggataaggtctggtttacctacgatgaggacgacgattgcaaccgttgggaacgcgtggagttgtaccagccgcgggatccgttcaaagtaggaaagaaccaaggcggaatagacaataacggacaggctgatccggcgggtgaccggggtgaatgggatgaggacaattccggccacgggcagttgtatgtcagcccgatagacggcaagatccacctgtacggagccgaatggggttgctggcgcatcgaccagaatgcccgttactatcagggaatgggcggaatctatgacggttacggtccgaaacgcatcgagaccgagccaaccgtgtttcctactgtcaaatatacggatacggacaataacggcttcttcgacctgatggagttcgacttggatggcgacaaggtgttcgaacaacgcctttccatgaaagagttggggctggatgaccgttgccaggtgatcaataccgcttccatgaagtacgaagattttgtcgatctcgaatcgaaagtttccgacaccatgtggaagaatgccgagaaagcggtcgaagtggcaaaagccaagaagctgaataccaaatggtatgctttgatgttgcagcctaaatccactcgcgaacgctatcattatggtttttggttgcagttctatctgtacaatgacctgaaagatctggccggacggacaaacgacaaggcgttggcaagcgtaattgacaaggcttatttgcaaggcaaatgggagctgattaaataatttattaacttaagaacaagaatagtatgaaaaacatttcgagaagaaccgccattaagacggtgttggcaggaagcgcagcgatggctgtatccggtatggaagcagcagctcccgcaaagaagaagaagaaagtagagaaacctgaaccgctgaaaggcaatatccgccattctgtaagtaagtggtgcttcggcagttatccgttggatgaattttgtgagatttgtaaaaacataggaatcgaatcgatagaactgctcgacccgaaagactggcctatcgtgcagaaacatggtttgacggttgcgatggcgcagggtgcgggcttaggtatcgacagggggttcaatgatcccaagttgcatgacgagctggtagccagttatgaacaagtcattccgatggtggccgaggccggactgacgaacctgatctgtttcgccgggcgccggaacggtgtgaccgacttgcaaggttgggaaaactgcgagaaaggcctgaagcgtctgatgccgatagccgaaaagtataatgttgtcctcacgatggagcttctgaacagtgtcggtcataaggattacttgtgcgaccataccgtttggggagcggaactgtgccgccgtatcggttcgccgaacttcaagctgttgtatgatatctaccatatgcagatcatggaaggaaacgtgatcgagcatatccggaaatatcaccagtatttctctcatatccataccggaggcgttcccggccgtgcggagatcgacgaaacgcaggaactctactatccggctatcatgaaagcgattgtggaaaccggctataaagggtttgtcggacaggaatttgtcccgaagcaggaagacaaaatcgcctcgcttgagaaatgtatccgtatctgcgatgtataaacagccaagtatgaaacgaattgctatttatcctctgctgttgctcttcgctttgtgcggatgtaaagggaaaaccgggacttcacaggccgggaatgtttttaaacccggtgaaatctggccggacaataacggcgtgcacatcaatgctcatggcggcggtatgttgcagcagggcgatacctattattggttcggcgagcataagacggaaggcgaagggggaaatgtagcccaggtcggcgttcattgctattcttccaaagacttatataactggaaagacgaaggaatcgctttgtctgtttcggatgacgagtcgagtccgatcgtgaaaggttgcattctggagcggccaaaggttattttcaataaaaagacgggtaagtacgtgatgtggttccatcttgaaccgaaaggcgccggttatacgggagccaaaagcggtgtggctgtcagcgaaaaggttacaggaccgtacaagttgttgtctgccgatcgtccgaacgccggtttctggccgaagaatgtgttggatatccataaaggtccggttcccgaagaatcgaagaaaggtttcggtggaggtggtctgcctgcccatcctgacacgttgaacctgctgggacgcgattttgagagcgggcagatggcacgtgacatgaacctgtttgtcgacgacgatggaaaggcttatcatatctacgcttcggaggataacagcacgttgcatatttccgaactgacggacgattatacggcttgttccggtaattacgcccgtttctttgtcggtcgtttcatggaagcgcctgccatgttcaagaaagacggcaagtattatctgatcatgtccggctgcaccggctgggcgccgaatccaggccgttccgcagttgcctcttctatctgggggccgtggaaagagttggcgaacccgtttgtgggagccgattcgggaacctctttccactcgcagagcacttatgtgctgcctgttcccggcaagcccggacagttcatctacatgggagaccgctggacaccgaagaacgccatagacggccgttatatctggttgcctatccgtttcgaaggcgaacagccggttatcgagtggctggacgagtggggaattgagaattgacaatggataactgccaatcgggaaaggaatgatatttaattgtcaattctcaattctcaattgtcaattgttttgtacttttgcagccgcataaaacaaacgaagaatgaaaccaacattgtcaatgaactctaaccatgtaatggtcagagaattaaaggactacctgatgatcgccttaggtatgatcttttatggaatcgggtggactgttttcctgttgccaaacgatttgccttctggggcggttccgggtattgcctctattgtctattggggaacgggcttgcctgtacaatacacttattttgccattaatgctttgctattactgctctcgctgaagattttgggttggaagttcagtatgaagacggtgtatgccgttttcgtcctgacgtttttcctttccgtgatacagcgtttgacatccgggcttcaattgttgcacgaccaaccgtttatggcttgtatcctgggggctatcttttgcggtagcggtatcggtttcgctttcactgcgaacgggagtacgggaggtacggatattattgcagcgattgtcaacaaatacagggatgtcagcttggggcgtatgattatgttctgcgatatgatcatcatcgcgtccagctattttgtgctacacgatttggagaaggttgtttacgggtatgtgacgctgtttgtcacagggtatatgattgaccaggtggttaacagctctcgccagtcggtccagttcttcattatttccagtaaatatgaggagatcggtagggagattaatgctttgcacagaggtgtgactgtgatcgacgggaccgggctttatacgggaaagcaagtgaaaatgatgtttgtcttggcaaaaaagagccagtccaatacgattttccaaattatcaatgatatcgatccgagggctttcgtttcgcaaagtgccgttatcggtgtatacggggaaggattcgatcatttcaaagtgaagaagaaaactaattgacgctttgttcagagtgcttctatgtccatgtccatactcttttttcgagatcctctgtcactctatcactaacagctttgcaagcattggtaaacatgatacacaggagtgatacatgccggattcatgtatcactcctgtgtacttatgtatcacaccttacccatgctttgtaaaacatacagtctttttttacttagcaagtatcttgattacaacagattggtatgtaatcttcccaaacatccgggtgtcggagccatgaacatccggatgtcgagggcggcaacatccgggtgtatgaagcctgaagatgggcgtgttcctgtacatttccgcttgcttttcacttttttcctgcttgttttctgtaaaaatgtaccttatgtaggcgtaataacttctgcaaggcggttacggctccattaccacttcgatctggttgccctgtcctaacaactttttggcaaaagcttgaatcttggctggcgtgatgccttttatcgtttcttcgtatgctgtctcgccgttgaacccgcggaagtaataattatccaaagtcgtcagccagtaaacattctcctgcaggttctctgtgtggcgcttcaggatattgtcctggctcttcttgaaatcttcgtcgcgcgggccggatttgacgatgttatccagttctgtccggacgatagcgttcatcttttcccgtttggccggatccgtatcgaaataggcttgcaggaatgtctgcccttcagggaaggaagaaatctgtgcggaagtctgtactccatatgtcccgccttcgtcctcgcgtaccttttccatgtagaccagatcgagaatctgctttaacatagtggcggtgaggatgttttcaaggttatattccatcttgccggaccagaagttgacaaccgacgctttcggtgtttccagagcgcgtttgaagatattcgtgtattcgcccttgcggatagccggtacttcggcgggattggctttttcggcacgtcctttgaccgggagtgtcgccagatattgttctacaaaaggacggatactgtctgtgtcgatatttccgacgaacgtaaagataaagtctgaagtgtcggcaaaccgttctttgtacatctccatgatgcgtgggtagctgatctgcttgaagtcgccggccgtgatgcgggcggcacgcgggttattgtcgtaaatcgcctttgtcagtgtgtcgctgaacgccaccatcgggttcagttccaggtttttcaattgtgcgatcatacggttctcgaaggatgtataagcctcttcgtccatgcgcggagccgtgaaatagagataaaccagctcaaacaatgtcttcaggtcggcaggagcggcataaccgtttacgttttccgtattcaggccgatggaaggagagcaggagactttctttcctgccaataccttgttcagatcggttgccgagaaattgccggctccgccaagcgtaatgacatcgttgaatactttcaggttgtcgatatctttcgctccgaacaaggtgctgccaccggggctggtggccgtcatcaggatctcgtctttcttgaagtccgtatgtttcagtacgaccttgataccgttgtcgagtgtcaggaccgtcgcgccgaacagcgggtccgttttcatctccctgatctttcccggagcgggcagttcggggatcagcggttcgttggaaacagtctcttcatagggtttgaccggtaattgttgcgccttgataaagtcttccaataattggacctcggtcggatattttatgtctgccttgtcagggccggtcaagccgattacgatattcttgtcgccgatcaagctctgggcgtattggttcacctgctcgatcgggatttgcggtgcgatctggctgattagctgatattccgtttctatgcccggaatgtaaccaccgtctgtaaagtggcggacatattcgttcgtataagagcggttcttttgtttgtcgcggtcgttgaacagcgattcgtattgtttcaggacattgatacgggcgcggtcatattcggaagccgtgaagccgtaccgtttcacccgttccgtctccgtcacaagcgcgtcgagtgccttgtcgatctcaccttcctttaccagggcggcaaccgtgaaagcgccttttgtcttggcaatcatgaaatctccatccgaagcctgggcggcgacaaagggaggatccgctttttgcatcatctcggcaaagcgttcgtttatcatcgtttcgacgacattttccatgtagtccttcatcaacccggcggcggtggcatacaactctttcggcatcttgtcgtgcttatagaatatggaaaggaccatattggaagcctccttgtccgtagcaatggaaacaagcggtttatcattgtccgccacttccgtatattcccgtttggccggatttactggagccgggatatcagcaaaaatacgttttacggccgcttccaccttgtctacatctatatcccctacaatgataatgccctgcaagtcggggcgataccattttttataatagtcgcgaagctcgtccggcttgaagttgttgatcacgtcgatcgtgccgatcggcatccggtatgcatatttgttgtccggaaacattttcgggagctgctgttcccagatacgcgcctgggcatcctgccgcgtgcgccattcctcccggatcacgccccgttccttttcgatggccgtatctgcgagggtgatgaagcccgaccagtcgtgcaggatcagcaggcaggagtcgacaatgctctcgcgagtgaccggagcgttcatgatcatgtagaccgtttcgtcgaaacttgtataagcgttgaagttctcacctccgcgcatcccgatgctttcggtaaattcatccatgccatgccctgggaagttctttgttccgtcgaacgccatgtgttcaaggaaatgggccagtccgcgctggttttcgtcttccaggatcgatccgacattctgggcgataaagaaatccgcacggtctttcggctgtgcattgtgtcggatgtaataagtcaacccgttatttagctgtccgtatcttattttcgggtctatgggcaagggttgtatttccggttgctgcgctgccaaacggagggaggctagtatccaaaggaaacatccgatggatagaatctgtctgatcttcatatcacttatattcttatttaaaagtcgacaaatgtatatagttttttgttacaacacccataaaccggaaaacgtttgctaagatttaggaaaaaacttctgagaaagcttttatgtaagaaaaaaatatctatttttgtgaggttgttgtttttatgtgcacgcaaacattaataatttatctaatatatttaccatgaaatctgaagatatttcacgtcgctcgttcctgaaacgggcagccgccctttcagctgcggcagcaattccttctttttggattccgtctaaggccaatgccatgccgggtgttccttttgtcagtgccaacgaaaaagtgagaatcgcttttatcggtatcggtaatcgtggaggcgagatcgcacaggaactgtataaaaccggtttgtgcgaagtggttgcactttgtgatgtggatatgggtgcacctcatactcagaaacttatttccatgttcccgaaagttccgcgtttccaggatttccgccagatgttcgacaagatggccgacaagatcgatgctgttacagtcggtacaccggaccattcccatttcccgatcacgattgaggcgatggctcatggaaaacatgtatatgtggaaaaaccgatggcccgcaccttccaggaaatcgaagtgatgatgcgtgccgaaaagaaattcggtgtcgttacccagatgggtaaccagggacattccgaagccaactacttccagttcaaggcatggaaagaagccggcttgatcaaagacgtcactgctataacagctcacatgaactctccgcgccgttggcataactggaacccgaacatcacgcacatgccaatgggtgaaccagttcccgaaacattggattgggacacttggttgggtgttcgtccgttccacgaatataatcatgactaccatttgggacagtggcgttgctggtacgatttcggtatgggcgcattgggcgactggggggctcacatcatcgataccgcacacgaattcctggatctcggtctgccgacggaagtaaatccgttgtatctgaaagatcataacccgttcttcttcccgatgtcttcccgtatcctgttcagattcccggaaagaaaagaaatgccggctgtcgatattacctggtatgacggtctggataatattcctcctgttcctgagaactacggttcttccgatgtcgatccgaatatcccgacggttgccggtggcaaacttcagttggcaaaattgaacccgggtaaggaaatctatacgaagactttgacattcaagggtggttctcatggtagcaccttgtctgtgattcctgatcaggtagccaaggatatgaatccgaagttgccggaatatcaaaagagcccgtccaaccactacgcaaacttcctattggcttgccagggcaaggaaaagacccgttctccgttctctatcgcaggtccgttgagccaggtattctgtcttggcgtgttggcacagcgcatgaaccgcaagatcgtgttcgaccgcgacacgaagcagatcgtgaacgatccggttatgaaccagatgctagttggcgaaatgccgcgtaaaggttgggaacagtactacaatatttaatgacgtcggtaggggcgaggtctactcgtcctctcataaagatagtttctaagatcgttattcataacggttgattgtttgagaaggcaagcttgtcgggtaagcttgcctttcttttttgattatctttgcacctgtaatacgcagggaacatgaatatatttgaaggatatgtgggcattcgcttatgggacgggcagttggtggatgatgtcatcttctccctgctgttattcctgtttattgccttttcctttgtgttccggacgaattttcaactgtttgtgaagatgctgaaagatgcttttctcgtgaaggaaaggcagaatctatttgacgatgtaatagggaagagcatattctttttccgcaattttatgacattccaagtcttgttcctttcaagtcttgccctgattgcggtcggcaggatatacggatttgtgaattatgcggaatggcaggcggttttatcggcgatcggaacggttttttgtgttttattcctgttttatcagtttaaacaatgctgttattacctcctgggcagcgtgttttccgaccccgataagtataagttatggaagacgagttataatgctattatggggatttggggagtctctttatacgttccggtgttgtggttggtgtttgtcgggacacaggttactataccgataacaatgttttgtattctctatattttgtgtcgttttgtaataatttataagacaatacggatatttcacaagaaaagcactggtttattgtatataagtttgtacctttgcggccaagaaattttacctctggtatttttgtacgaaggtatggtttatttgtataactttatcgagacaagtactctatggcattgaacatcaaaaagttgctggtatcacaaccgaagcctgcatccgagaagtccccgtatttcgacattgcagagaagtatggagttgagattgacttccgtccattcattaaagtagaacctctttcatctaaggagttcagacagcagaaaatttctattttggatcatacggctgttgttttcacggctcgtacggcgatcgatcatttctttcacctgtgtgaggagctgcgtgttgccattcccgaaacgatgaagtatttctgtatgactgaggccattgccgtatatttgcaaaaatatattgtgtataggaagcgtaagatcttttttggacagaccggaaagctggatgatctggttacagttatcggcaaacatgcaaaagaaaaatatcttgtgcccgtttccgacgtgcataaagatgatttgttaactatgttggaagcgaaaaagatttcttttacgaaagctgttatgtaccgcaccgtaagcaatgatttctctaaagacgagaaattcgactatgatatgctggtatttttcagcccttcgggaatttcctctctgttgaagaacttcccgaatttcaaacaagaagatataaagatcggatgtttcggcccgacaacagccaaagcggtgaaagaggccggtttgcgcctggatgtggaagcgccgactcccgaagctccgtctatgacggctgccctggaattgtatctgaaaaaagagatgggtagtaacaaaaagaatggtaaatagaaggtataccctttcaaaagaagaacgtctgtcgtggaaacgttacattgacctgttgtttgcaaaagggcaatcgtttgtggcgtttccactgcgggtcgtttatttagcggtggaagaagagacattagctccagtgtctatcttggtgagtgttcccaaaaaaaaattcaggcgtgccgtaaaacggaatctgatcaaacgtcaggttcgcgaagcctatcgggtacgcaaatatgatctgatcgatccgctgacgggaaaaaacaagcgtatgctggttgctttcctttatttggacaaggaaatccatccttttgccgatatggaaaaagccatgacaaaagcattgaacgtacttcgcgacaaggcatgataaagcgtttttttacttttcttctgttgttgccggtctatttttataaatattgcatttctcccatgatgccggcatcgtgcaggtacacgcctacttgttccgaatatgccgtgcaggctctcaaaaaacatggtccggtaaagggattgtatttagcagtcaaacgcattcttcgctgccatccctggggaggaagcggatatgatcctgtaccgtaaagtatggtttattacgatatacatactcaccatttgcccgttcatccggaagatgtcgctatagttaacagtctggttcctacgttcgatgtggaaacggggttgttccgttctgtcggcattcatccctggtatatatataacgtggaagaacagcttgccgaattgaaacggcaggtctcatttccggatgtagtggctattggcgaaacgggcttggataaaggtgcggaagctccgttggactgtcagcgggaaatctttagggcgtcggcctctcttgccgaaaatgctggcgtctttttaatcattcattgcgtgaaagcttgggacgaactgatagcctcgaaaaaagaactaaagcctcgtgtaccgtggattatacacggttttcgtggtaatgccacattagccgggcaacttatccggcagggtttttacctctcctttggcgagtatttcaaccccggagccgtacgtgaagcatggcccggccgtttgtttgccgaaacggacgatcgcgaaatcgatatccgaactgtctaccggaacctttcggtttccttgaatctccggcttgaacagtttgccggacaggttgccgaaaacgtccgtgacatccttcatctaccttaaatcattgttataccctaattttcaattctcaattctccattttcaattataaagtcgtacctttgcccgcattcaattaatactataatctaaaacgatgaattttgttgaagaattaacatggaggggcatgatcgctgatatgatgcccggaacagaagaacagttgcaaaaagagatgacttctgcttatgtaggtattgacccgacggctgactcattacatatcggtcacctggtatcggttatgatgctgaaacatctccaacgtgcaggacaccgtcctattgctctggtcggcggagctaccggtatgatcggagacccttcaatgaagtcggcggaacgtaatctgctcgatgaagcaacgcttcgtcataaccaggatagcattaagaagcagttgtccaagtttttggatttcgattcggacgcgcctaatgctgccaagttggtaaacaattacgactggatgaaggattattctttcttgaattttatccgcgatatcggtaagcatatcactgttaactatatgatggctaaagaatccgttaaaaaacgcctgagccgcgaatcttctgtcggtatgtcgtttacggaattctcttaccagttgcttcagggatacgattatatgtatctgtatgaacacgaaggctgccgcttgcaaatgggaggaaccgaccagtggggtaacatcacgaccggtacggagctgatccgccgtaagttgggtggtgaggcttttgctttgacctgcccgttgattacgaaagccgacggaggcaagttcggcaagactgagtctggcaacgtttggttggatcgccgttatacatctccttataaattctaccagttctggctgaacgtgagcgatgccgatgctgccaaatatatcaagatctttaccgatctgcccaaggaagaaattgatgccctgatcaaagaacaggaagaagcaccgcatctccgtccgttgcagaaacgtttggcaaaggaagtgacggtcatggttcattcccaggaagattacgatgctgccgtcgaggcttccaatatactgttcggaaactctacgtcggaagcattgaaacatttggatgaacagacattgttggatgtgttcaacggtgttccccagtttgaggtttcccgtgaagagttgagtgccggtgttaaagcgatcgacctgttcactgaaaaggcggcaattttcccgtcgaaaggcgaaatgcgcaagttggttcagagcggcggtatcagtgtaaacaaagagaaactgacggatcaggatatggttatcgactgctcttccctgttggatgagaaatatttgctggttcagagaggtaagaagaattactatttactgatcgtaaaataagaaactgtttggattttttacaaaaaatgcttgcaaggtaagattttattcttacctttgcatcgctttagataaagcgccggattgtctcatggtgtaatggtagcactacagtttttggttctgtctgtcgaggttcgaatcctcgtgagacaactcacagaacaaaagggtcggaatgaaagtttcggccctttttgtttttgtgacgggaatgtatcatttctgcatgattaattctcaaatttgtaagtggcggacgacggtatatccatatatttgtgcattggatattatggaaattcagttgatcttaatgttatgaagtattgttgtctgttactctctttcctttggggatttgtgttttttgtttcgggacaggaaagaatatctgtttgcaatcttcggtgtgaatatctggaagatccggttgcagtggagaatgaaaagcccttgttgagttggcagttgcaatcctctgggcaagcgaaaagccagacagcctaccgtatcctcgtggcaagctctccttctttgctagctgaaggaaaagcggatttttgggattccgggaaaataacatcttcccgttcctgccaggtaggatatgaagggaaaccgcttgattccaggcaaacgctttactggaaagcgatggtttgggatgaagcgggagaggcttcgccttggagtgaaacggggagatggacgatgggattgttggaaccgtctgattggacagcccggtggatcggcaaccgggaagacgcttatcccgattcgacgttgactactccggctccttatttccgtaaaacattccggataaacaagccggtcaaacaggcgaaagcctatatatgcggactgggcttttatgaaatgtacctgaatggcgaaagggtaggcgaccaggtattggctcccgccgttaccaatttcgatcgtcgtccgctcaaaaagatgttgtatttctttgatgatcaatctaaccaaagggttctctataatacgttcgatgtcacgtctttggtgcagaaagcggagaatacggttggagttctgttgggaaacggctggtataaccagcgtgaccggacggtggaaggttgtatgtggtacgatacgccccggctgttatgccagttggagatagaatacaccgatggatcgacggaactggttgttacggatgatagctggaaaacaacgaccggccctttactgcatgacgccatattcacaggtgaagaatatgatgcccggctggagctggacggctggaaccggaacgggtacaaggattcttcctggaagaaagcccttttggtaagggcgccgaagggcagtctgcatgctcaacttgcccctcatgagaaaattgcccggacattacagcctgtaagctgcgaacaaaaggacgattctacttattggtatgcatttccggagatgatttccggctgggcgcatataaaagtgcaaggcaatgccggtgaccggatcaagcttcgttttgtcggagaggaaaaaaatgatttcggacaagtggacctctatacgttgcggggcggtggagtggaacaatgggaaccgcgttttacctggcacacgttccgctatatcgaagtcatatcccgacaggtcaggatgaacaaggaaagtctggttgcaaaagtcgtgcataccgatccgcagcctaccggaagtttcagttgttcgaacgaattgtttaataagatcaacgaagtctacttgcggacgcagaagaataactttcacggcagtatcagcagtgattgcccgcaccgggaacggttggcttatactggagacgcgcaggtggtcgtggaaagttctatcttatctttcgatatgacgcagttttaccggaaatggtttgacgatatgggggatgcccggaatcggaagagcggttatgttccgcataccgcacccttcggtggtggaggaggcggtccggcatggggatcggcttatgtgatcatgccctgggcctattattgttattatggcgatacggttttgttgaactgtcattatgaaggtatgaaacaatgggttgcctatctgggaacaaggaccgacgcccgtggaatcatcgtccgggaagagccggatggctggtgcctgggggattggtgtgcgccggggaagaagatggaactgcccgaaccgttggtcaatacggcttattactatcattcggcagacttgatgtcgaaggttgcggctgtcttagggaaagaggaagacagactgcactttgaccggctgtgcacacggatcaggcaggatttcaatactgtctttttcaacccgtcgacccatcattattgggaagggcgacaaggtgcggatgtattcccgctggctttcggaatggtgccggaaggtgaaaagaaagccgtgttcaacgctttgctcgctcatctggacagtataggaaatcattttgacacaggtatcatggcaacgcctttgctcttgaaagtattgagtgataacggacgtgccgatattgctttccggttgatgaaccagcgcgagataccggggttcgggtatgtgatggatgaccgttattcttgtttatgggagcgatgggaaggaaaggcatcccgttgccatccgatgttcggtagcgtggtggcttggttttaccggacacttgccggaatccgttatgatgaagcggagccgggtatgaagcacattgtcatcgctcctcaaccggtgggcggcctcacttattgcagcggatcgtatcaatccctgtacggtcccgtccgctcggactggaggatagaagcggattcgtttgagttgacagtcgaggtacccgccaatacgactgccacggttatcttgccggacggcaagatatacagaaatgtcggatcgggcatccatcggttcgcgtcgccccttatgtcggatcgttgaaccagatagaagggaaaattcctcatccggcagtgcttatcgaggtcagtttcttttatttgttgggtttttggttgtgaagtgctgtctttaaactgacaaagaacctttgctatgatattatgacgtgccgataggaaaatgagaatgacctttctgtttttgtaggaggatgcgacaaatatatcctgcgagagcatcttgaaaaagataaaaaacttgtatgtttgtagggataaaaacagaaatgcgaaatgaagacattagtacataccgacaaagaactgattgaagcgaccattaagaagtgtgatatctgttatgtgggactggccgatacggatgggactccctatgtattgccgatgaactttggctatcgtgatggtgttatatacctgcattcggcacaggaaggacggagtatttccattttggaacggaatccgcgtgtctgcattacatttagcacggaccatgatctcgttttccagcatccggaggtcgcttgtagttaccggatgcgctccaagagcgtgatttgctggggtgaagtccactttgaagaagatttcgataaaaaaacggaagctctggatatcattatgaaacagtattcggataaggaattccgctattccgatccggctgtgaagaatgtcaaaatatggattgtggaaatggacgaagtgacctgcaaggaattcggggcaccgcataataagctgaaaattggaagttaaaaattgaaaattgacgttgccgggtggtttgtctttttggataaagcgttgtatgatgggcaaataattgtcaattgtcaattgttaattgtcaatttcttcttacttttgttgccaaatatgatattgctgaataatgggattgcaaaagcatagcaaggtcttgaatgatacagttgagatgctctcggacgaggggtcttaccatcaactgtttcatgcttaccgcgatgaagaggcgcttccttcgggtgaggtgctgaaagagatcgtagatttatgccgggcaatccttttccccggttattacgggaatgcacggatcagcaagcagaccatccgttttcataccggcgtgaacgtcggaacgttgcatacgctgctttccaagcagatttatgcagggctttgttttgctgatactgcctgtgtttcttgtcccgaagaaaagatccttaccgaggtggaaaaactgtcggaagcctttatccgtacgcttcccgaaatgcgcgccttgttggcgacggatgccgaggctgctttcaacggtgatcctgctgctcagaacatcaacgaagttattttttgctatcccggtttccgggctgtctgcaactatcgtattgcgcaccagctataccggttgggcgttccctttattccccgcatgattactgaaatggcccattcggagacaggtatcgatatccatccgggggcggagatcggacactatttctcgattgaccacgggacaggaaccgttatcggtgagaccagtgttatcgggaaccacgtccgtatcttccaaggagtcagtctggcaggagagaaactgccgcctgacgaaaacgggaatgcgatacgcggtgtgccgcgtcatccggtgttgggcgatcatgtgactgtctattccaatgccacattgttagggcgtattcgtattggcgaaggagctacgatctgtggcaacgtctggatcacggaagatgttccggcgggagcaaccgtgagccagcagacaattaataaagtcagttgactgccagtgaagtcatagaacaaagaataattaataattaaaatagaattactaataaacgatgaggaatcattgttaactttcaacttaaaatgagcgaaacatttgaaatggtggctaagaccctttacgggttggaagaaatcctggccggcgagttattatctttaggtgccaacgatatacagattggccgccggatggtttcctttaccggggataaggaagtgctttacaaagccaacttctattgccgtacggcattgcgtatcttgaagcctatctatcactttaaagctaaagacgccgatactgtctacaaagaggttaagaaggtgaaatgggaaaactacatgtctttggacaagacgtttgccatcgactctgtaatctactctgaagatttcaatcactccaagtttgttgcttatcgtacgaaggatgcgatcgtggattatttcatggagaaggatcagaagcgcccctctgtccgtgtaaacaatccggatctgtatatcaatattcatatttcacataacgactgtacgctctctatcgacagttcgggcgagagcttgcataaacgtggttaccgcgtggaccagacggaagctccgttgaatgaggtgttagctgccggtatgatcttgaaaacaggctggaaaggcgaatcgaatttcgtcgatccgatgtgcggttccggtacgttgctgatcgaagcggcgatgatcgccttgaatattgcgccgggcgtgcatcgtaaggagtttgctttcgagaaatggatcgatttcgaccaggaactgttcgaccgtatctataacgacgagagtcaggaacgtgagtttaatttcaaatgttatggtgccgatatcaatccggcggcgatcgagattgccgagaagaatatccgtagtgccggtctgatgaaatatatcgaactgaggacccagccgttccagcaatgcacggaggctccccagccgggcatcatggtgaccaatcccccttatggagaacgtatttccagtcgtgatttgttggggttgtacaatatgatcggtgaacgtgtcaaacatgtgtttactggctataaagtatggattctgagttataaggatgaatgcttcgacaagatcggcttgaaaccgagtgaaaagatgaagcttatgaacggatcgttggaatgcgaataccgttgttacgatatattcgaaggaaaaatcaaagactataagaaagcactgaacgaagaaggtgaagcacgtccttcccgcccggaaagaccttctttcgaacgtaagccggaccgctcgtcacgtccgaatttccgtaccgaccgcatggatcgtcccgcccgccgttttgctgccgcgcatgctgaggacgacaacgaacggacaccttttattcccggcaaacgctatttcggcgatgaccgtgcagatggccgtccggctcgtagggattttgtcggcaaacgtcctgtcaagagacattttaaggatgacgaggagtttggcggtaagaaaaagttcggtgaccgttcgtttaagaaaccattcaaaagaagaggaaaggatgattttgaggattaatattttaggtgtattatgtgctttggcacttataaatccgttgtcgatgatgggacaagacaaacagtttactttgcatgacttgattcccggtggaaagacgcaaagtcgttttgtgcctcgcaacttgaaacagttgcagtggtgtggagacacatatctgtatgtcaagggtgacagcatgatgagtggagaatcgacaaaggcggtgaaagtcgcctttacccgccagcagttgaacgaagcgcttgcggtggccggtgcgcagtcggttggcggtatgcccttcttctcggttccttacaaagatcagccggtgcttgcttttaatgccaagcaccatcgtttccattacgattttgtggaaaacaggattgtaagcatgtatgatctgaatggttcctgggagaatttagacttttgtccggccaacggttatttggcttttacggaggaggacaacctgaaaatcctttcgccggataacgctgtcagtatcgtgacggacgaaacggctgaaggtgttgtttgcgggaagtccgttcatcagaacgagttcggtatccataaagggactttctggtctccgaatggttcggcgctggctttctaccggatggatgaaagcatggtgacggattatccgtttgtcgacattactgcccgttgcgcgaaagccgaaccgcacaaatatccgatggctgggatgaaaagccatgaggtgacagtcggtgtctacaacctggcgaccggaaaaaccgtctggttgaaaaccggattaccgaaggaaaagtatctgacgaatattacctggagcccggatgaaaagagcatttatattgccgaactgaaccgggatcaaaacgagatgcacctggtacgctattctgccttgacaggtgataaagaggcggatttgtttaccgaaaagaacgaacattatgtagagccgcaacatccggtgcttttcctgccgaacaatccggatcagtttatctggcagagccggcgtgatggttataatcatttgtatctgtataatacgaagggagaactgttgaagcagttgacggaaggcgagtgggaagtcctggacatcctcggtttcgatgttaagggaaaggcattgtttttctcttccacaaggccgtcaatgctgagctcgttcagttatggtgatgctctgtatgtcggaacgtcacgcctggatctgaaaaagggaacttcttacgaattgacttcgggaggtttgcaaggagttcatgctacgcaactgagtgcttccggtaaatatttgatcgacagttattcagctcccgatgttccacgtgaaatttcgattatcgacggacagaaacgtgaaactttacggacgttgctgacggcgaaagatccgtatgaaggatatgcgatgccggaaatcgttaccggaaagatcaaggcagcggatggtgtcactaatttgaatttccgtctggtaaaacctgtcggtctggatgagacgaagaaatatccgacgatcgtttatgtgtacggtggtccgcacgcccagttggtaacaggcggatggaagaacggtgtaggcggttgggatatctatatggctcaacgcggatatgtggtttttacgctcgatagtcggggatcggcaaaccggggacaggctttcgaaaatgtcatacatcgtaatttgggtgtgaacgagatggcagaccaggtaaaaggcgttgagtttctgaaatcacttccgtatgtcgatgccgaccgtatcggtgtgcatggatggagctacggcggctttatgacgacgaacctgatgtgttcgtatccggaactgttcaaagtgggggttgccggtggtccggtgatcgactggagcaactacgagattatgtatggcgagcgctatatggaccgtccgcaggacaatccggaaggttataggaatgccaacctgaaattgaaagcaggtaatctgaagggacatctgctgttgatccacggagatatcgatccggttgttgtttggcagcacagcctgggattcctgaaagcctgtgtggatgcggatacatatcccgattatttcgtttatccccgccatctgcataatgtgattggtaaagaccgtccgcatctgtatgagaagataacgcgctactttgacgactaccttaaggattgacaattgagagaaagaacaaagatgaaataacaaaaaaacaataaccattaaaaaaagatgattgggaaaggataatgacaagtaattgtcaattgtcaattgtcaattgtcaattataaaaaaatgaatattcttttattaggctcaggcggccgcgaacatgcaatagcctggaagattgctcaaagtccgaaagtggatcagttattcatcgctcccggtaatgcaggtactgcattggtaggcacgaatgtaaatatcaaggctgacgatttctctgctatcaaggaatttgccttggcaaatcatatcggtatggtggtggtaggtccggaagatccgctggtgaaaggggtgtatgattatttcaagaacgatgtcgccctggcaggtattcccgtgataggcccttcgaaagagggtgcgcaactggaaggcagcaaggactttgcgaaggccttcatgatgcgctacaacattccgacagcccgttataagagtatttctgccggaaatttagaagaaggatacgcttttttggaagaattgcaggctccctacgtattgaaggccgatggtctggctgccggtaaaggtgtgctgattctcgacacgctcgaagaagcaaagaaggagctggacgatatgctgggtggtatgttcggcgatgccagcaagacggtcgtgatcgaagagttcctggacggtatcgaatgttccgtgtttgtgatgacggatggcgagagctacaaggtgcttccggtggcaaaagactataagcgtatcggcgaaggcaatacaggtttgaatacaggtggaatgggagccgtttctccagttccttttgccgatgagacgtttatgcagaaggtggacgagcgtattatccgtccgacgatcgaagggctgaaagcggaaaatatcgactataagggtttcatcttccttggtctgatcaatgtgaagggcgaacctatggtgatcgaatataattgccgcatgggtgatccggaaacggaagttgtcatgttacgtatccaaagcgacttggttgaactgttggaaggtgtggccgaaggtaatttgggcagtcgtacattggttcacgatccgcgtgcggccgtaacagtcatgctggtaagcggtggttatcctgaagcgtatgaaaaaggaaaggttatcagtggtctggataaggttcccgccgaaaacatcattttccacgcagggacaaaagctgccgatgggcagatcctgaccagtggcggtcgtgtcatcgctgtcagctcttacggagccgacaaggaagaagcccttgtccgatctttcgccggtgccaagctcattgatttcgaaaagaaatatttccgtagtgatatcggattcgatttataaattgttgtcataaatgctgatttatagggtgagctaacagacgattcaagccttgtgtgttgcaggctctcttttgcctcgtctgttggctcgcatgtaagtcagcatttatctattcctgatcagaaatgcgagtagcttataacaaatattcccgtcgattcgacttctccgcgccaccgacattcgcgccggtcttattggcatgtattgcctgttgggtggtcagttatttgtactccgtgggctatcctgtctatggcgaggtctcggctactcctctctggaatacgatttgtcagacattgccaggcaaggagtttacctatattatcgggatggcgttgatgttcggaggggctttcctattgcatcgtgcgaactatgtactggtgttgatacgggagaagacgatgctgcccttcctcttctatgtcctgttcatcagtacgaatcccgacttctttcctttgaaatcgacttcggtcggtgttttctgcctgattctggctatttaccaactgttcacgacctatcatgatcccggggcgagagagaaggcctacagtgccgccttgctgatcggtataggcagtctgctttgggttcatttgctgtggtttttgccgttgttctggctggggatgtataatttccgttcgctgacgtcccgtacctttatcgcctctttgttaggggtggcgacggtatattggttcctgttggggtggtgtgtctggcaacgggatttcacgctgttcaacgtccctttctcgacgcttttcaaggtgcgcctcttggcgacggacggaatagtgttgctggattggatcagtatcatggcgattgccctgttgacagttgtcgcttccctgaatattgtcatgcacgatacggaggattcgcttcgctcccgtcagtttctctcgttccttattgcgatgtccgtatgggcgttcagcctttatttcctctatgatcaggtttcggaagaatttttggaaacagcttgcgtgccagcctctatcctgatcgctcatttctttacggtgacacgtggcaagatcgtgttttggtcgttttttacaactgtggcagtcctggttgccactctattcattcgtatatggaatttcttatagaatacggatatatcggtgtgttcatcgcctcttttttggctgctaccgttttgccgttcagcagcgaggtcgttctaaccggagtgttgttggcgggagcgacctactggccttgtatgattgcggctacgttaggtaatttcttaggtggcatgagttgttattggctgggtatgctgggcaaggtcgaatggatagagaaatatctgaaactggatgccgtcaaattgcagaaagtgcaggattggataaaagggaaaggttcctggatgggctttttcgttttccttcccggtataggcgattttatcgccgtggcgctcggttttctccgcgccaatatctggatcgtggctgtctcgatgtttctcggaaaggcgatccgatattgggtttggatggaatttgtctataaagtacagggaatgttttgattattccactttgacatatattttcgtatacacctcgttatggcgggcgtaaatggcataatttccccggatgtcgctccacgaaggcagaagtgtgactttcagtatgccgccttcggtcgtaatctgaaagaggtcttcgaggtcgctatcgtagctgaactccgtgtctttgggaaattcccggacaatctcgtcttcataaccgcttaccactgtcccgatcgtgctgtcgtaggcgggtaacccgtctgcttcgggattgatcagggcaaactggatgacagcgcctactcttttctcctctttcatgatctcggatccgacatagaattggtagtagtctcctgccagcgccaatgcgaattttcccgatggaaattgcttcacggcttcttccttgaaagcttggtagaggtgtcccggcgttacggctgcttgataaaccaatccattgccgacttggggcggaatgacttttccaatccctttcgacggaccgatttcggcgatcaggcattcgtttgtttgaaagttgtttgccgcgttgatatagatgtccgaattgcccagacgggtcgctccattctccacatcgagcatgttcaaggttgttgcattgttgatttcaggagccgaatcgtcgtccgaacaagaaaaagccggtaacagaaatgccgccagcaagagctggaacaagaaattctttttcatttcttctttatttataagttagacaataggtaaaacatgcacaaaggtatttatattttcctgaaaagctaatcattccctttatatttcgcccgccaatgggacggaggcatgccgacacgctcgatgaaggcgcgactgaaggttttcaccgaactgtagcccattttcgtcgccactttgcccaaaggccagtccgtatggagcaggacgtcgcggatggccacccaacggtaggcttcgagccattcgtctgtagtcaccccggtcagtaccctcaggcagccggacagatcgactcgcgagacgcctaatttttttgcatagaaaaccggatcatgattcatataatgatgaaccatcgaggcgaaaaggtccaaaaattcgttgcccgttcgtttatggaaaatgatacccgattgtacgccttgccagcgttccgcttcggttgcttcccggccgcagaaggagataaagatatctttgggagtgtatagggggtattttgtgtccatttttgtatatattcgtttgtttatagcttatacaagaccgacggattcgttcaaggggcaattagagaacgaatctgccggttataattcgttaaccggataattgtagaatgaatatgggagttatgattcattcgctaaatgctcgttaaacgaatctgttgatcataattcgttctacaattaattgagaaacgaatccgctattctgccagccatttgttaatctgtgtcagtatcttttccttcatgtcttcgggcatgttgccgatacgggcgcggtggctgcctccgggttggatgtagacttgttcgtttaccttgcctttgaagatcgggacgcgggtggcgctccacgggtctacttcgccatagataaagatcatcttcggatcgttgtcacggaggaaatcatagactttgtggtaaagttcggggcggtattcaactttgtcgaccagctctttcggcagcatgatgcggttcaggtatccccggctgctgtcgattgtcaggtatttcctgaacggtttcgtgtcatagccgtaataacccaattcgcgggcagcttgtacgaagaaggagatattcggctggttttcggcaaaatagtcgggcccgctgatgtcaaccaaatgataaaacagtgtctttgcatcggatgtgagcggcgggatcacgctggtcggcgtaccccattgccagagggcgaacgggtattccaggacgcaataatccaatacttcggctatcggaatgcggaattccagcttcttgtccttgcagaacttttccagcatcgggacgatttcgtccttgtgtttcaatatttcaatctggaaagcttcgatcttctgacggtctttcttcgtgcctactttgcggagaaacggttcgtggcgcccgtcttccacaccgcggttcaagggggctacgtagggaacggagaagtctacgtcgtccggaaaccaggcacggtacaggcaagtggtttgtccgcctttgctgatgccggtgctgacccatttcccggtgtacagctctcggaatatttggttgacgttatgcaggtcgtaggccgagttctctgccgtcaggtatttccaattacagggggtcggggtggattcgaggaaataacggtattccacgaataccatattggcatcgagcagcttcgacagctcttcctgataacgagggttcaaggcatacgccgcaccatatccttccgtgaccaatatggtcgggcggtcgaaaccgacgtgggcgacgatcacgcgttgcgtgaatgttccggctgccgggttcttatggtcgacaggctgtgtgatgcgtacgagatatttctcggcataatggtccgattccagcttctcgatgccgctgattcctttcagcccttccaatttcttttgtaattcctgtgcgttacctgcaaatgcgactgtcagcatcaacaggaatgcgacgaggcatggcgataaggttttcaatgtccttctcatggtattaatcttttaagttatgtatatttcgtatcaatccttcgtatttggctcttttgaccgccgattgggcaaatatacgattataatcctcacgggaaaagacctttagatcctcttttcgaagagaaagcaaagtcggtttcggacggaatgcctctatttgggtcgggcgggcgaaacggttccaggggcagacctcctggcaggtgtcgcaaccgtagaggcggttaccgagtcgggaagcctgttcggcggggatttctccgcggttctcgatggtgagataggagaggcatttgcgggcattcaggtggcgggggccttccagtgctcctgtcgggcaggcatccaggcaacggctacaactgccgcaacggttcttctgcggtgtgtcgtactggtccgcttcgagggtggtgacgatttctcccaagaagaagaaagagccttttccgggaataatcaggtttgtgttcttcccgatccatcccagtccggctttccaggcccaatagcgttcgaggatgggagctgagtcggtgaaaaagcgggcggctgttacgtctgcctgttccgttcccgcgcttgacgcgggatcgcaaaagaactgcccgttgcgatccattcctttcccgtccgtctctatgcgatcccgcgcggggcgcgggaacagggcggtccatagctcgctcaacatctctttgacgacgagatggtaatccttcccgtaggcgtagtaggcgatatggggcgcttcgggtggaagtttctgctccggataatagttcaacgccacggatatgactgtcttggctccttccaccaatccggcgggattcaaccggatctcgcggtggttctccatataggccatccctgcatggttgccctccttcagccatctgtcaaaaaataaggcctcgctgtctgcggccgctacttgtgcgatcccgcaggcatcgaagccgatctcttttgctttctcttttatttcgatagctggaagcatattaaaacactttgaactcatacccttgttcctgtagccattcgatggccctgggcatcgcttcgcgcatgttgcgttcggctttcagtgagtcgtgaaagacgattacggaaccgttgcgggtatagttcttcaccacgttgaagacaccgttcggtgtcatgtgcggactgtaatcgcgcgtcaccacgtcccacatgatgatccggtaatgcctcctgagtcctaccacttgtgggaaacgcatgtgtccgtggggcggacggaacaggtcgctttttatatattcggcagccttttccacattcgccagatagttcttggtccagaagcggataccttgaatatggttgaaagtgtggttgcctacacgatgccccctgtccagtaccatctggtagatgtccggatgtttgcggacgttgtccccgacacagaagaaggtcgccttcacgtcatatttgtctaatatatccaatacccaaggggtaacctcagggatcggaccatcgtcgaaggtgagatatacacacttcttctttgccggaatccgccagattacccctggaaacagagccctgtaaaaccagggcggttgttctataaacatatctattctctgcgcaccgattcgtaagccatacggtagttgtcaaactcttcctgatatttcttgttgaattcggggttgtaatgtttgttgattaacaatacttgattcaaaacctgcatgtcctgtaacaattctgtttctacggacgctaactgcactgggttcaagcggaagtaccagtttatgttacgcatcatgttatcggcgatgcctgtaaatatttctgccgctttttctttctggcccagcacataatagagttcaccggttgaaagagccgtgtagtcgagcgggacattttccggcggcaacacctgcatacatttgtccaatacttccaaagccttgtcgttcttgccttctttcaccaatgcttctgccaacttgttgaacagcatcatgcggtagctcttgcacatgcgcattacattttcgtcgatgtaaacgcctggcttgtctacgccgccccatttgaatttgttcatcacgttgtcgtacattttgtcggtgttgactgctttgttggcatttttcggaacgacctggtaagcgagacctgtctgttcgaagtagccgtccaggttgacgaactgatccgggctgaccgtgatcgcgtagtacataggacgttcgaagttgttggtctgcaacatgtcgaggatcgtcagttcctgtttacccagcgcattctttccggcgaggttgatcatcatctggtctaccatgccgtctgtcttaccgcctaagatcttggcgccggcgaccgagtcgactttgtagtacagtttgtcggccgggatataatcgagttcctggttgatacccggaatcttcttgaacttcggatcatcgctacggacaaagttcaaggctgtgttcaggtcgatcgaatcttttgtcagcgggaatacataagctgcatcgcgggtcccttgtatatactggtcgcgtgtccaggtgatcggcagcggagcggactcgtaagcctgtttcttcatctggtcgatataccagtctgtttgcaggtagctggtgttacatacgcggacatcggtacggacgccttctacctcctgggcataccacaaggggaatgtgtcgttgtcaccattggtgaagatgatggcattcggctcgcaggattccagatagttggaaccgaaatcgcggcagacatagcggcctgaacggtcgtggtcgtcccagttttgtccggccatctggataggtatgaacaagcaaagcacggttgccaccgatccggcgatgaccggattcagtttgccgtatcgctccagtcccttagccagtgccgcgacaccgaacccgatccagatacagaacgcatagaacgatccggcatacgcatagtctcgttcacgcggctgatatggcgtctgattcagatacagaacgatagccagaccagtcatgaaaaacaggaagaaagtcacccagaaactctggatccccttttcgcccgaataagcctggaacagcaaacctaaaatacctaacagcaacggcagcatataatagacattgtgccctttattattgataatatcgaacggcatatcttcctgcgggcccaccagaacttcgtcgataaacggaatgccggtaatccagttgccgttcagcacctctccatttccctggatgtcgttctgacggccggagaagttccacatgaagtagcgccagtacataaagttcagctggtaggagaagaagaacttcagattttccgcgaatgtcggtttcattacgctcttcatctctccgcaatagttatatttcaccggttggccttttacctgcgaccattccttataggcctgtacatggcgcggatcggagctgtacatacgcgggaacagcatgttcagttcgtcgacatatttgtattcctgatcggtgcgggacacgaaataacggtctttctcgtttttgtccttcttgatcacacggctccaggtcggttcgccttctgtcgtgacgggtacgcagcttcctccctggttttcgcgctgtacttccgaaacgtaggtctgcccataaagaagtggggttttaccgtactgttcacgtgccagataggtacgcaacgtaaagatatcgctcggcgcgttctggttcatcggcgtatcggccgttgcacggatcagtgtcagtgcatacgaagaatagcctacaacgactaccatcaggcagaccaggattgtattcagcgtcttgatatccaccttcttgctcttgaacaggtacaggcttaatgcagccgtcagaatgaccgccaaaacataaccgctaccgataaacggaataccgatcaatacgaccgacaggatgaaagcgatcttcatgcgtgtcggatggatctcgtcgcgcatagtttcccagatagaccagatcaacacgcctgccacaatgatcacataagcgaataccccggaattgtaaggcatgcctaagacgttgacaaataatagttcgaaatagccgcaaacctcgaccagcccctgtacgacaccatacatcatcagcgcaacgatggcgaaggaagcgagcaaagcaaccaatgtacccttcatcgtcgggttcgggaatttcttatagtaatataccagcacgatagccgggatacacagcaagttcagcaagtggacaccgatactcaaccccatcaggtaagcgatcagtacgatccagcggtctgcatgtggtttgtcggcaacagcttcccacttcaggattagccagaaaacaacggctgtaaagagtgatgaataggcatacacttctccttccacggcactgaaccagaacgtatcactgaatgtataagccagtgctccgaccagaccgctacccataacggtaatcatctggcctaaagacgcttcttctccgtctttcaccatgatcttgcgggcaaggtgagtgatactccagaaaaggaacaagatcgtcagtccgctaaacaaggcggacatcgtatttaccatcttcgccactgtggacggatcggatgcaagttgtgtgaacaggttggccgtcaacataaagaacggtgctccgggcggatgccctacttccagcttgtaagctgaagaaatgaactcaccgcaatcccagaagctggcagtgggttccatagtcatcaaatagacggttgaagcgatcgcaaaaacgatccagcccaacacgttgttgatcaatttatactttcccatactttgtataaagtgtaataattaattgtcttaattctgtatcctcacacggatagttggccgcaaaggtaagcatttacgtttaataccaacgtcctgatacgctataaattgtgtggaagagattagaaatatattaaaagaatccgttgaatgacagtctgaaatctgtcagtttgccgacattcggatggtggcaaactgacatttgcggacaggattccatttaaactactctgtttaccgtcccttcgagtaaggcgttattatagtttgtgtcaacagccgcctgtactgcaccttgtcggctgtaatgttatatgcgaatccggccagactgttgcttgcggatttttcagcctctcgttttgacgaaaatgaaccttgagccatttacttattccaagaaatggatcggtattacattttttaggctacctttgaccgttgcagatatttacttgcattatagcatcttttaccactatcattctaccatcatactaaattggcaaaatacggttcttcattccacaaaagccctctcttcttttagcagaaacaagcagataattccgtaaacacccccatgttgccatcctttacatccgggtgtagagagccggtacatccggatgtaaaggatggcaacatggggatgtccggcaactaaagtaccgtgccggagaatgaaaaccactcggttttacctattttatagccgtttttacataaaataatcgagtgatttgcagagatggggatctggtgtttattgtttgtttttatttgtaatatgttaatatacagatgtgtataagcggaatacctgttctccatccaagttgccagtgatagggttgtgatactgtagtgatatagaaaacgggcatatatcactaatcaaacaagttgaatatcaattggtaaaaaggaatcagtgatacagtgacagaggaaatgggaaaaactttggttcttcgtcacttctgcaagggcttgaaatagcgggtcatccgcttacgctcatggtcaatgtgcgtaagttccgctgcagaaataccgcgtgtcaaagaaaagtcttcagcgcccctctctctccgctggcttcttcgcacgcgcgaaatacccggaaagtggaggaacgcatccggagcatatccttgaagaccacttcccgtatcgccggtaatctgctgcatgaacaaaacatcgtctgcagccaatcttcttgcctgagacgtgccaatgtccgtatactggttgcggacagcatagggttacagagcccatctcagtcggtgcaatggtccgtaataacttcggcaaacgtcgaatgcaaaggaaatactgccgttctcaggaaagacggtaaatctttttccttgaagattgtttcgcctgtctatgcttcttttacgacaagggcggcaaaaagaggaacggaagcagagaaaccgatagagggatatacgatcctatctgcatcggtatcaggtgaccctgtacaggtgattaaagttctcctgtcgggagaatagaagagtagttacattaaaaataaatcatggtaaaagtgaagtatttaatgggcatggtactcagtgttgcgttgatttcctgcgggggggacaggagacgggtttgttgaagagaacgtagaatttgcccgtaaacagatcaaaaacatcaagtggaaccatgatgtcggttttatgatctattgcagttttgggaacggtttgcgtctgacgggcgatccagaatataaggaggtgattgttgaggctgcccgttccttgtccacccgcttccgtccggtggcagggattatccagtcgtgggatgtggatagaggatggatttcggaaaggggttgggagtgcccggtgattatcgataatatgatgaacctcgagctgttgtttgccgctacatggttgtccggcgactcaactttctataaggttgccgtttcgcacgtcgaccgcactatgaaagaacaatatcgtccggatggcagttgctatcatgtggtggattacagtatgaaagacggttccgtacgcaatcgccatacgacacagggatatgcgcacgaatcggcgtggagccgtagacaagcttggggtatttacggtctgatgctgtgttatcgagaaacttcttgctgatgcattgtgtcggaagcattccgcataatggagaaatagatgtcccgttgaactatgccgactattacttcttggaggctttgaagcggaaacgggatatcgagcagaagggctccaaaggctgctaattgcatctgcaaaaccggttcgcgccacaggtacaagtcggtccgtatccgccgttttgtatttcgtcgcagtacaggtcgtacattttcattttgatttggttgctgatccgacgaaattcattagcaatggattcaggcgtgcctttcgcacgtgccgggttgtagaaattgctgtgtatcaggttgcgtacttttcctgtgaaagcaggatagttttcttccgcatctctgctgacggtgattacatagtcccaaggttcatctatatattcttctacagcttctggtttatgatggctgatatcgatgccggaggatgccagtgtctggacggcgagcggatgcacctctatggccggactgattccggcggaacagactgtgagtgatttgtcgaatgattgcaaccagccttgcgccatttggctaaggcagctgttgtcggagcaaagaatcaatattttcatcgttttctttttatcgttacggatgcaaaaataataaatgccgggctttgatgactttacagtaaattgattttgtttatcgcatgaaagatattttctatatatgttcgttattgtttgctctggcagcttgtctcttgtgaaaaacaggtagcctcttttcctgatcaatgaagttgtcgaatctcttttactgccgcgtttgccctatgcgtttgtactggctgggatgcagaagaattgggttagggatgtgttggaagagaaaatacggtattatggaagaaggatgaaatattatatgtgactggttgttgttatgcccagtcgggaaaacctgtatatgttgtccgttatgtacaaacataagcgaatcactgtcggtgtgggaatgggcaacccgtttgtcgataactacaagcggattaatgaaacctggaatttcccgtttggacggaactatcagagtggtggaaagaaaatctggaatcaagatacggatactggcgtgatgaatacttccaaataatgaatttttgcaggccttgtcttgttctttttattatttcggcaatatttcgtatatttacagcctattatggcttatgagcaattaccgcagagcccgggatgatgcaaaagatttggatagagatatatgagaccagaagatattactgaacaggacgaaaacggaaaaataaaagatacggaaggacaactggctgctgatgaaaacaggaatgagactgtcgaaacagaagtaagccaggagatacattcggaatataagataccgggcaaatcggaaagccgggtgtcttatcatttgtcgggtatgtatcaggattggttcctcgattatgcctcctatgtgattttggagcgtgccgttccgcatatcaacgacgggctgaaacccgtacaacgtcgaattttgcactcaatgaagcggttggacgacggacgctacaacaaggtggcgaatattgtcggacataccatgcaattccatccgcacggcgatgcttctatcggtgatgcactggtacaactcggacagaaagacctgttgatcgactgtcagggaaactggggtaatatcctcaccggtgacggtgctgcggctccgcgttatatagaggcgcgcctctccaagtttgcgctggaaacggtcttcaatccgaaaacgactctctggcaactttcctacgacggacggaacaaggagccggtgacgcttcccgtcaagttccctttgctgctggcgcaaggtgtggaaggtattgccgtagggctttcttccaaaatattgccgcataatttcaacgaacttttggatgcctccgtcgcttatctgcggggagaagagtttaccctgtatcccgatttccagactggcgggtatattgatgtctcaaaatataatgacggcgaacgtggaggttccgtaaaagtacgtgccaagattacgaaactggacaacaagacgcttgtcatcagcgagatcccttatggaaagacaacctctactttgatcgaatcgatcctgaaagcaaacgataagggaaagatcaagatcaagaaagtggatgataatacggctcgtaacgtggagattctcgtgcatctggctccgggtgtatcttccgacaagacgatcgacgcgttgtatgctttcacggattgcgagatcagcatttcgccgaactgttgtgtcattatggacaacaagccgcacttcctgacggtaagcgatgtgctgaaacattcgactgacgacacgctgcatctgctccgtaccgaactggagatacagaaaggggaactggaagaatcgctcttctttgcctccctggaaaagatattcatcgaagaacgtatttataaagacaaggaatttgaggaggcgaaagatatggacgaggcgattgctcatatcgaccaacgtctcgatctgttcaaaccgcactttatccgcgaagtgactcgcgaagatatcctgaaactgatggagattaagatgggacgtatcctcaagtttaatacggacaagtgtaatgcgactattgcccaatataaggaagatattgccaagatcgacgatcatctggcgcatatcgtcgattatacggctgactggttcatgatgctgaaagaaaaatacggtaagaactatccacgtatgaccgaggtgcgcaacttcgacacgatcgaggcgaccaaagtggttgaggcgaatgagaaactgtatatcaaccgtgccgaaggatttatcgggacaggtttgaagaaggatgaatttgtctgcaactgttccgacatcgacgatattattcttttctatcgcaacggtacatacaaggttgtgaaagtgagcgagaaaatgttcgtcggaagggatatcctttacctgaatgtgttcaagcggaatgataaccgcacgatctataatgtgatctaccgagatggaaaggtgggttataattatatcaagcgttttgccgtaacaggtgtgacacgtgataaagaatatgacattaccaagggaacggaaggttcgcgtatcctttatttcagcgccaataccaatggcgaagccgagacggtgaaagtgatcctgaagccgaaaccccgccagaagttgttggtgttcgaaaaggatttcagtacgatcgcgatcaaaggacgcggttcgatggggaatatcctgacaaaggcggatgtgcataagatcagcctgaagcagaaagggagttcgacgctaggaggccgtatggtctggtttgaccgtgatgtgttacgcctgaattatgacgggcgtggagaagagctgggcgagttccagagtgacgatctgatcctggtgatccttcagaatggtgatttctatacgaccaatttcgatttgagcaatcattacgaacctgatatattgaatattgagaagtatgatgcgaataaggtttggacggcagccctttacgatgccgaccagaagtattactacctgaaacgtttccagctggaggctggaagccgcaagcagaattttctcggcgagaacccgaaaagccgcctgatgctgcttaccgacgaggcctatccgcgaatcgaggcagtgtttggcgggcatgacgctttccgtgaaccgctggtgttggatgcggaagaattcattgccgtgaaaggattcaaagcgaaaggaaaacgtatttcgacttttgatatagagacgatcaacgaactcgatcccgtccgttttgctccggcggaacaaccgcaggagcagaatgacgacgatggagaggatccggatctcgatccggatgccgataagagcaactcggatattattgatgagattaccgggcaaatgaagcttttttgagaatgaataattaaaaacgaatgatttagtggcaactgttaaacgtcaactattaattgttaattccctctgccttctcttcttttgcctccctttcccggcaaccgctcaggcagaggacgtaccccgctcgatcaatgagagcactatggttgggatcggcggttataatttgagggacacctatctatcgcccagtacggacattaattatacgggctgggtggcacgggtcctcaatgaacggatgaagatcgttcggttggcagactataatgtgtcccgccagcaactgatcaacgtggagttcggttcgacccgcaacggcgcggagacggcaaacgaatatgccggatttgtggactacagcctgggttatcattaccgttttccgcaagtgctgtccggattaaaggtcttgaccggggcatccgcacgtctttcaggtggttttatctataatacgcgtaacagtaataatccggtttccggcaaggcggatttcgacttgaatctgtcagccatggcgatctataatttcaggatcaaggattttccgctcacgctccgttatcaggcggagataccgtttgccggtgtgctcttctcagtgcataaaggcgaaccctattatttcctaacgcaaggcagtgcggacggggttgtgcgattcagttcgttccataataagtttgcgatgaagaattatttcacgcttgacattccggtatcgagctttacggttcgtgtcggttacctgaacagtatgtaccggacggatgtgaacagcatcaagacgcatgtcctttccaattcgtttatgatcgggcttgtgaaagagtttgtttctttcggaggcaaacggttgaagagcgagcgatatcggtacaaaagcgcatactattaaagatttatgatttatgaagcctttcttctttttcctctgttttctctttctcttcggttgcgagaaagcgacaaaatataactcgtctccccgtgataatttcgaggcgctttggcgtatcatggacgagaattactgcttctttgccttcaaggatgtggactgggacgatgtgtatgaccgctataatctgcttgttaaagacacgatgaaccagtacgaattgtttgatatcctcggaaaaatgcttgccgaggtgaaagacggacataccaatctgatctcttctttcgatatgtcccgttattgggcttggtatgaagattatccggctaacttctataaagaaatacaggacaattatcttggtacggactacaagattgccgggggaatgaagtataagcgtctggcggacgatcagattggatatgtctattacggtagtttttcaagtggcgtgggtgaaaacaacctcgattatatgtttgcgcatttcaaggaatgcaaaggattgatattcgatgtgcgcgacaatgggggcggttccatgctctattccgaccgcatcgcctcgcgtttccttgaggaaaggattctgacgggttacacgcaatataagaaaggaaacgggcataacgattttacccagcccaatccggtctatctttccccgtctgaccgcactcgttggttgcgcccggtcatcgtcttgactaaccggcattcttacagcgctacgaacgattttgtcaatgtgatgcgtctccttccgcaagtcacggtcatgggtgaccgtacgggaggtggcagcggcctgcctttcagttcggaattgccgaatgggtggagtgtccgtttctcggcttgtccggtcctggatgtgaacaaacagcacacggagttcggaatcgatcccgacaccgcggtagccattacgggcgaggacatcatgaaaggacgggacacgattatagaggcggcgatagggttgttgctggcaaagggggattcggccatctcatactaaactggcgtgaaaacgaaaattcatttaaatcctatggcaacatttgcatattaacagaatttgtttacctttgcaaacgcaatgcggctgtggtgtaattggtagccacgtcagacttaggatctgatgcttcacggcgtgggggttcgagtcccttcagccgcacaaaagagtttgttcgattgagagcaagctctttttttatttgtcggatgttcctatctttgtgtccttgtcaaaataatgaataagatgaaatataccggaatatatatcctgttgacggtgctgttgttacttgccgcatgtaccggaaagctgacggaaggaaaggtggtgacggtgacgatagagacgcaacgtttctttgcagaaaggattgcaggagataagtttgttgtccattgtgtagttccatccgggcagagtccggaaacgtatgatcctactccgaagcaaatggtgcagatcggacagagtgaagcgtatttgcaaatcggttatattggcttcgagcaggtatggatgcagaagattcgcgagaataattccgatttgaagatattcgatgtctcgaagggcatgcagtttgtaaaagaaacggaagaaggggagcaccggcacgaggggcatgaagcggatgacggacatcatcatcaccatgcgggtggtatcgatccgcatatatggagttccatcgaaggggcaagggtcgttgcctggaatacactgaacgcttttatcgagctggataaggagaatacggagtattattggaaaaattataacgatttactggcggagatcgataagacagaggccgagatcaaacgtttgctcgatccgctgaacgaccgtacttttatcatctatcatccagcattgacttattttgcagctgaattcgaactcgtccagctttgtatcgaaatggatgggaaagaaccttcacctgctcaattgaaacaattggtgatgacggcaagggagaaccatgcgaaagtcgtttttatccagcaggagttcgatcagaaaaatgccgaactgattgcgaaggaaacaggttgccggctcgtgaaaatcaacccgctggattatcattggaatacggaactgattcatatagcgaaagcattggctgatggagaaactgattgacatagatcatgtgacggctgcctacggcaataaaaccgtattgcgggatatttccctgacaatctggaaagatgatttcctggggattatcggaccgaacgggggagggaagacgactttgctgaaggttatactcggccttttgccgcctgtctccggcgtgatccgcttttatgaagacggacggatagttccttctctacggatcggttatcttcctcagttgaacaatatagataagaaatttccgatctctgtgcgcgaagtggtgacttcggggttggcctcggaaaagccgcttttccgttcctacagtgcaagccagaaacagcgcgtggaggaggtgcttggaaaaatgggactggaagatttggcgaaccgggcaatcggcgaactgtccggcggacagttgcaacgtgtgttgttggggcgttctatcgtttcccgtccgcaagtgctgatcttagacgaaccgaattcgtatgtggacaaacggttcgagtctcatttctataagctcttggacgagattaataaagaaagtgcggtcattctggtttcacacgatatcgggactgtattggcgatggtgaaaaacatcgcttgtgtaaacgaaacattacattatcatcccggagcggatgtgtccgaagagtggctgggcgagaaatatgcttgcccgatagagctgatcggacatggcgatttgccgcaccgggttttgaaaaaacacgaacatgagtaatctttgtttgataggcctaccggaagtcggatatattgctggtatcgctgttcttattttcggcattactgcggtgaggcaaaatcctttcatcagtcgcgggcagaagattctttggatactgactattgtcgtattgaattggatcggtctgttgctgtattactatacctattacattaagaagaattgacaattatgaaaaagatattgattacgggggccagtggctttattggtggtttcctggtgaaggaggcgcttaaccggggatatgaaacctgggcaggtgtccgttcgacaagtagccgcgttaatttgcaggatgaacggattcgttttatcgacttgaaatattccgaccgtgagtcgttgaccgcccagttggctgattttgtccgtgagcatggtccttgggattatgtgatccataatgccggactgacgaagacgcttgataaaagaaacttttatcgtatcaatgcccagaatacggccaacttgatcgaggcacttgccgcatcgggttgcaagcctgagaaatttcttttgatgagcagcttgagcagctacgggcgtggagacgagaaaacattccgccctatctctctggatgatcctcaattgcccgatacagattatggaaagagcaagctggaagcggagaattatttgcgtcaccagtcttatttcccgtatgtgatcctgcgtccgacaggggtgtatggaccgggcgagaaagattacttcatggagattaaaagtgtaaagtctggttttgattttgctgtcggctttacgccccagcgtattacttttatatatgtaaaggatttggctaccgttgctttccttgctttggagaatgaggctgtccggaaccgccattattttgtagcggacggtgatgcctatacggatgaatcgttcgcccggatgatacaggaaatcctgcggaagaaacatgtcctgcatgcccgtattccaatgggactggtgcatatagcctgccaggggtccgaatggataggcaagctgctgaagaagagtatgacattgaatacggataaatatataatcctgaaacagcgtaactggatttgtgatgttacaccgcttcaggatgaattgggcttcgttccggcttacccgttacgccgtggcctggaagaaagcatagaatggtataggaaagaaggttggctgtagaccaacttttcttttgccgattcgtattttattttacttcttcaacagttcctttgccgatgactttctgttgtacggctgtcgggcctttatagcggatatttcctttacctacgattgttgctttcaggttgtcggtcggatggatctgggcggaacctttgcctgtgattttacagttcacttcgggcactgccaccccgaaagccatgatttcaccgtcggtcgtaatgctgtagtctgcttcttcggcgtttccagcttttaggttgatcgtgccggaaccgttaatgctgcattccaacttgtcggttttgagttcattcacgaccatattggcgctaccagacacgttcaggtcgagcttgccgacttcgactttctgctttagctggacgaggcagttagagttggcgttgattttcaattcgtcacccttcaatgggctgttggctatgaagttggcgttgccagaggcttttacctctttcagccatttggagttagtcttgacgatgaatttggtgaaatggtcgactttcgcacctttgaatccaacggtcaggacacggtcttggatatcgatgtttacgtacgggtgcagattttcatctacagttatttcgatatgcggagtagattccgactgctcgtagttgaagtcgatcaccccgtcgaacttgatggcattgaagtcgtcgatcgttattttcttagtcgagagctttccgtttcctttcacatgatctgctgcctgggtagagaaaaacattcccattaggaaagcgatcattagtaaaccttttgttttcatgtctatcttctttatgttacacttaggaatgcgtttgccgcactttggttacaaatgtagaatgaattttatagaaatactaattctttttgatcgaacctccgcctatgacgcttttgcttagctctggatcgccttcatatcgtatatggccaccgccggctatactggcatccagttgttcggacgcatgtacttcgatgtctccgccaccggctacgctgcattccgctttccgaaggacacatccgaaagcactgatatccccaccgccagctacgctcagatctcctctttcggcctctcctttgagcaggatggaaccactgcctgccacgctacaatccaggttgtctactttcagttgggttgcgttgatatctcctgatccagccacgctaaagttgattttgcgcgcttccagctgcttatcgaagtttattgtgctgcttccggcaatactgatatccagtttgtcggctttaagagggctttggattacaaactctccgcctcctactgcacttatctctttcagttcacgggagctggtctttatctcgcatacggtcggttggagattgagtccgtaagaatttccgttaaaatattttttttcatttttgggctgtatgatcaatgtcttgccctttatctttatgtcgaggtggggtagtatgttctcgtctattgttatcttaaaaaagggggaggcgttggattgttcatatttgatgtttacttttcctacatatgagatctcatcataatcggatatggaaatttctttcgtgatgatgttcccgtccccttttattgtattctgggcaaatccgttagttgtcagcaaccagatacaaaccataaagaaaaatgcttttgttttcatgtcttgttatattttcgtttattttcttttatagacgagaggggacatattacggttgcatattttctttactttttgatgaattagtttttattatatgctttacaacacaaattagtactttaactattgacgaattaggaaaagcccgtatctttgcatcgtggttttttcataatagtattagatttaaggttaacaaagttggttaggggttgtcgtgagacagcctttaattttttatagggatttctgtactgcagaaatattttctatttcctggttggaaagataatctccgtcctttatcaaaatctgatgggtgaaagtgatggaatcctctttttttagcaggatttgaactttttccgcctgtttatcgaaacaccgtcctcccaggttattaatcgcaaacaggccgtattcacgtgcatgcgaccaacccggataattgggattttcaggatggtctatgatagcgatcgatattttctcatcttttatcttcccgttcaaaacaacccaagccgaacgttttccccaaacatcgttaccggtatctccttctttattttgatagattccggaaatgtcggcttcaaggtttcgatctaaacgcataccgagtaagccttctttattttccgtaatgaaaatagaatcgttgaaagcagtcagtgtagtggttcgctgaatgcctctttcgtgtggcttaccggtgaatgcgtaggtggttttttcttttagtaggatatatccattgtggtttgtccaatttgcttcgactgtaaattggttttctttttcgtttatatttttgatgccggtaaaccggataatgccgtaatgttcttttttattatggggaatgcgattcgaattattccaaaaatccaatccgttgatgcttccgaagctaaaccatagtcccatctgatgaggatgatctgtccgttcatcggctttcgggcgggcaggataaccgcgagtaatttcggtaccggatgcagtatagataggataaaggacttgtttatataaagtgtcagagtaaagaaattctgtaaaaagagtctggtctatgtatatgcttattttttgtgagtcgggcttctctataaagtgtatgtgtgaatcctgacctattacagaattgcaataagacagagagaagaggataagtagaatcagtttgttcatggagtaaaataattaaaatgggctaaaaagaagggctaaacctaccctgtccccacacttgacgcggggacagggtaggttgacatcctctttgaatgtttataagatacgtttatacaacttcttttcctgtggttggatcgaagttaaatctgcaatttttaccggttgtccggatgctatactgttgcgggccgcgattccgaccagacaggccaaagctccgtcgcgggtatttgcacactgttggaacggatcgtcgatattgggcaggaatatctggtcttttaataatgcatccccgccgccatgtccggatgttccgaacggaatctggatatattgccgtttattgaagtttttgaacaaaacgatttcgtcataattggcatccgatgtcggtttggattcctgaatccaggcttccagacgtccttttgttccgttgaatgcaatccggtaaccttcgtatggagaataggttgtcaacgaataggctacttgtacaccatttttatatttgattgttgccgccattttgtcgaagatgtttacatcctttttgaacacacaaccgtcgcgcaggtaaccgtcgtacttttcattggccacgtacagttccatgtagttcttgttcttggtgatgtcaaaaaagaacttgcatttgtctgtatgcgggcatgtacggcagttttctgcccgtatggttccattctttccataatggttgagagccccaagcgcataaacactttcgggatcgctgtcgatccaccagttcaggaggtcgaaatgatggctggctttgtgtacccataacgaaccgctgcattcaacgagcctgtgccagcggcggaaatagtcggccccgtgtgaggtatccagataccagtggaaatcgacggaagtgatatcaccgatttctccggcacgaagcagttcccatatttttgcccggtgaggggaataacggtagttgaacgtgacccggcatgtcttgcccgtccgcttttcagcatccagaatcgcttggattttcttttcatcggtcgtcatcggtttttccgtgataatgtcggctcccaactccattccccggataatgaattgatggtgtgtgctgtccattgtcgtgacaatcaatacatccggttttgtctcgttcatcattttttcaaaatcggtatatgtcggacaagaagtgccgatgatacgtttgccggtttcaacacgtccttcgtttttatcgcaaaggcctacgaactcaaggtaatcaggataacttttcagaatgtcccttccccacatggatgtcccgcggccccctatcccgacaagtgcgatccggagttttttacctgtcggtgctgaaataccggtagtttttgcttttatatcagataagggattgagcaaggccgttccggcaatcgcccctgtggttgcaagaaaatgtcttcttgacatttggtttgttgtgttatgcatggtaatgatgttttgtatgtttttgtggtctgtttttagattttcgatgatttcatattcagctatacttgaatttttctcgaatagttcctccgaacattgcaaatatatgcaattttggggcattggcaaagatcgaatgaatatctttggggaggctatcaatgcttttttatcgggattattccgttatttgccgggatttagtcgttactgaccgtttttttattgtgtaagcggttatgtggcggtagttttgcaacaaattaaaaatgtacgagtatgagaacgaatcaacaaggggattttatcagaggcggttatcccagccacagtagactgaacacggttacgacggctgctgtgtttatcatagtaggtctgttgtttcttgggcggaatttcgggataatagactctgatctgtttggtatcctggtttcctggcagatgttgctgattgtggtcggcgttgtcaatttgattaaacggcatttcttcgggggagtgattacgattgccgtaggagcttatttcctattgccggaaataagctgggtagagggcgaatggctcgatatgttctggccggtattgtttatttttgtgggaatcatgatactctttaaaccggaacgtcaccacttcaatgctcattgggatggcagaaggccggaatatacaaaagaggtatatggttctgaagacggttttatcgtatcggacaacactttcggatcggttcagcagattgttttggaccctgtgttcagaggggcgcgacttaggaatgcgtttggcgggactgtcctggatttacggaggagcaagctggaagctccccagacgtttatagatatcgactgtacttttggaggggtcgagatttatttgccgtcggattggaatttgctgacgcagattgatgcatttatcggcggatgtgacgataaacgctataattcgtctgtggagatagacaaggaacacattttgatcgtgagaggaaaagtctcttttggaggtattgagtttaaaagttgatttatgcagacgcatccatttatagggtcggtcatcaatcgcgtgatggggattaccctgtcggttgtggcctggatgatgtattcatggctcctgttctgctatggaggagaggagatatggatagcctgcctggatggattggtctctgtcggattattggctgccgccggtttcctgtacggatatgttgacgggactattcatgctctgcaaatacaggtcgcattggcggtattggttcaggcgatcagtctggcaggggctttcgagctacaggtgcttttggaacgaggaaatgtcggtgattttatggatagtgtttccctccgtctggtctttggcatattatgctggatcatcctgttgcaatggtatcggatgaaccggacggatgaatcggattttgaggagatatccggaactgaggcggataagggacaagaagaagcggttcccgctggtgaaacttttctggatcgcgtatcggtaaaagacggttcccgcattcatatcatccatctcgaggaactgttatatctgcaagccggaggcgattatgtgacgatttttactccggatggccagtatgtgaaggaacagacgatgaaatattttgagacacatcttccacctgctctgtttgtgcggattcaccgttcttgcattgtcaataccgaacagattttacgagtggagctattcggaaaagaaaattatcaggtccgtttgaaaaacggagtttgtttgcgggcaagcaatgccggttataagctcctgaaagagcgtctttctctttaagaaagaggaatcgaaatgttaattttagcagaatttgataccattgtgtaaagttttgccctttgtaacactttttattgcaaagctcttccagacttaacatatattgtctgtaaaaggcttgacaaacggtcttgacacatgtatctttgcattgtggttttttcataatagtattagatttaaggttaacaaagttggttaggggttgtcgtgagacagcctttaattgtttatagaggggagcttttccccttttttatttttcatatgacggatcttgttatgttttggcttcaccttgtcctttcactctttgattatcaaagtgtacaagggtgaaggtgaacatcgggactgccttcaccttaaaaatttgctttcacccagtgtctcgtcctgaaataggttgactatgctcccccttctgtctcttatccgaagcaacctatttaagtgaaaaataaagagattatgaatgtgtataatggtttaatatatagtcatttaatgtttgtcttatatccttctatcttatcgacctaagtcgaaaacctttttgcccattgtcgaaagcctttttgcccaaggtcgaaaaggtattcgacttaggtcaaaagctctatggcattatagtttggcgatagaagcatggcagttgtagctttataacacactttccgtactcggtttactttttccggtgaaggcggttggcagattatggcgaaaaaacaaacagatagtgtgtagtcaaccttcgtttgtttaaaaagaacgtgtatctttatcttcaaataactggaatgtgatggaattacgaacagagaatgtgacgcgttatatcatgcctcttcgggaaggcggatcgttgccggcattggcggaagctgatgacgagtttaaatatgtcgtgaagttccgtggggcaggccatgggacgaaagcgttgatagccgagctgattggcggtgagatagcccgtgcacttggtttccgggttcccgagctggtctttctgaatctggacgaagctttcgggcgtaccgaaggtgatgaggaaatccaggatctgctgcaaggcagccggggattaaacctcggcctgcattttctgtcgggagctcttacttacgacccggtagtgacgaaggtcggggctgagttggcgtcccgtatcgtgtggctggatgcgtttctgaccaatgtagaccgtacattccggaataccaatatgctgatgtggcataaggaactgtggctgatcgatcatggcgcttcgctttatttccattattcatgggtgaactggcaaaagcatgccgtaagtccgttcgtgcaggtcaaagatcacgtgctgttgcccgaagcttccgggttggaagaggcagatgccgagatgaaacgcctgctgacggaagagaagatccgggagatcgtggctctgattcccgacgactggttgcactggagtgaaagtcccggtaggccgcaagagataagagagatttatatccggttcttatgtgagagactggcacattccgaaacatttataaaagaagcacaagatgcaaggaaagcacttatatgaatatgccgttatccgtttggtccccaaagtagaacgtgaggagttctttaatgtgggaattattctgttctcgaaaagagcgaagtacatcaaggcgctttataaggtagacgagaacaagttgaatctgttttcttctgagttggatcgtgaatcgttgtttgccaatctgcatgttttcgataaaatctgttccggtacgaaggagggcggtcctatcgctgctctggacgtcccggaacggtttcggtggctgacagcagtgcggagtgcatctatccagacttcacgtccgcatccgggtttctccgatgacttggaccagacgttggagatactgttcagggaattggttctgtaacgatattgtaattgatagtaaacagcgatttaatactccggttgttcctttgcagcggttttaattaggtgaaaatatatttgttttaacgcaaaaagaacaaacatggagattaagagtagagtgacccgatttgcgggtttgctatgtatcgcaggtgcattacagggaatccctgtaatctattccgccaatccgggcggaatcataagcgtagcccggcagggcacgtatcatctgacaggtacgattgtggatggatacggagaacccgttatcggagccaatgtagtggaaaaaggaacgactaacggggcggtgaccgatattgacgggaagttttcgctggaggtagcccctgacgctgtgttaaccatctcttttatcggatatatctcgaaagaaatcacactgaaaggagagaaagagctgaaagtggccttggtggaagatacgcagacgctggacgaagtggtcgtggtcggttatggcacacagaagaaagtgaacctgaccggagctgtcgaacaggtgaccagcgaagtgtttgacaatcgttccgttcccaatgtgacacaagccctgcaaggttcgatccccaacttgaacatccagttgactgacggcaagccgacccgttcggcgagttataatgtccgcggtacgacttcgatcgggcagggtggtagcgcgttggtcctgatcgacggtgtggaaggtgatccctcgatgttgaacccgaacgatatcgccagcgtgtctgtcttgaaagatgccgcttcggctgccatctatggggcgcgtggtactttcggggtcgtactgatcaccaccaaagagccgactaaggacaagacttccattacctattccggaaatttcgccatgcagaaaccggtgacggttcccgacttcgtgaccgacggatatgaatatgccagtcatttctatgaagcctatcatgcatggaacaactattcggccgaccctaagaacattaacaagacgcaggaattctccctcggctggctggaagacttcaaaagacggaaggagcagggcataactgacgaggtgacggtcgatgctaccggcaaatatgtctattacggcaacgaggattattatgacgccctgtacaagaaaacgactttcgcacaggaccataacttgtcggtgaccggtaacaacgggaaactgaactactacgtttccggacggttctatggctacgacggtttgtttcgctataataccgacaattataagatgatgaacctgcgtgcgaaaggttccgtacaggtgttcgactggctgaagatcgagaacaatatggatttttccaatatggattaccataacccgatcaacgtcggcgaaggcggctccatctggcgtaacatttccgatgaaggtcatccgacctcgcctatcttcaaccccgacggtagcctgactttctcggccgcttattcggtcggtgactttatctatggcaagaacggtatcgataccaataacaaggtgttgaagaatacgaccggctttactgcttcctttctggaaaacaagttgcacgtacggggcgacttcacgttccgcaacacggacgagggacaaacgcaacgccgtgtaccggttccttatagcactcacgaagggcagattgtcgaactgagtaccaaatacaatgacttgaaggaaagtaatatgcggaccgagtatattgcgaccaacctgtatgccgattatgaggatacattcggtgatgcgcattatttcaaaggtatggtcggttacaattatgaacagtcaacttataagagcacatatgtgcagcgtaacgggttgctgctcgacgattcggaaaacatcaacttggcgctgggagatgcgatcactacgtcgggaggttataacagatggcgcgtggcaggtggctttttccgtctgaactatgcgttcaaggatcgctatctgttggaagtgaatggacgctatgacggttcttccaaattcccgaccgatcagcaatgggcgttcttcccttctgtctccggtggatggcgcgtgtcggaagaggcgttctggaaggtgaacccggatttgttctccaatttgaaaatacgtgcttcatacggttcgttagggaatggtaatgtttctccctatagcttcctcgagttgttgagcatcagcacttccggtcgtgtcctgaacggtttgaagaacaagtatacgagtgctcctgccgtcatgcctgacggactgacctgggaaacggcaacgacgaccgatgtcggactggacttcggcatgttgaacaaccgcttgcaatttaacggtgactattacatccgtaagacaacggatatgtacacggtcggcgaaacgcttcccgatgtgttcggcgcctcttctcccaaaggcaactatgccgacatgacgaccaagggatgggaaatcacgctgacttggcgcgaccagttcacattggcggagaaaccgttcaactacgagatccgtggaacgctatccgactatatctcgaccatcgaccgctataacaaccagacgggtaacctggatgactactatgctggcaagcgtgtaggtgaaatctggggatatgtgactgaagggctgttcaaggatcaggctgatattgacagccatgccgaccagacactgatccagtcttcatccaagcgcatcacctatccgggagatgtgaagatcaaggacctgaacggtgaccatgtgatcgactacggcaataataccgtggacgaccacggtgacaagaccgtgatcggaaatgcgttgcctcgctatgcgtatagcatcaacctttccggtgactggaacaacttctttctttccgccttcttccagggtgtgggaaaacaggattggtatcccagttcggaatgtattttctggggacagtataaccgcccgtataacaacatgcctacttggcatcagggcaactattggacagaagacaatacggatgcttatctgccccgttatgccggctacaatgcttccctgaagtctacaccgcagacccgctacttgcagaatgtcgcttatatccgtctgaagaacctgcaattcggctacaccttgccacagccgatcgtttcgaaagccaaattgcagaatgtacgggtttatatttcggccgagaatctctggtgctggtccccgctctacaagcatacgcgtgacctcgacgtgacgaacatctacggttccgatcccgacctgacggatgccgatatgtcgtccggactgaacgggaaccgtggtagcggtgacgggaacagctatccgcagatgaagagtgtgagtttaggtttatcagtaacattttaattaaagaactatcaacgacatgaaacggattatatattcttttgtatcagtctgtttactcctttcctcctgctcaatggacgagacaccgcaggcttcggtggacaaagacacagtcttcaggacggagaaagggctggaaacatattcctattctttctataatatgctcccttccgtcagtgacggtttcaggcaggatgccatgtgcgattatggagcggtgaccagcttcgacaactttatccgcgaaggggcttactcggccgagttgagcagcgggtggtcgtggagcgatctgcgcaacatcaactactttattgagaactgtacgaacgaggcggtcgatgaatctgtccgtaacaactatatcggcttggcccgctttttccgcgcttacttctattacgagatggtagtacgtttcggcgatgtgccttggatagaccgtacgttaggtgtggacgacgagttgctgtatgctccccgcgattcgcggactatcgtcatggatcatgtgttggaagacctggacttcgcttgtgagaatatctcgcggacgaaggacgaaaccggttctctggtgacgaaatgggtggcttatgcgttgaaatcccgtatctgcctcttcgaagcttcttttcgcaagtatcatacggagttgggattgaccgactcggccgacgaatggtatcaggaggttgtccgtgctgccgaaacggttatgaaggaaagcggccattctatttatacgggtgagggtacggatgcttctttccgctcgctgttcatcagtgataagccggtaactagtgaagtgatgctggcgagctgcgccgatgccgggctggctgtgttgggcgaagctaactggtggtggacttcaggcacgtacggagcgcgtttcagtatgatccgtacctttgtcaatactttcctgaatacggatgggacaccgtttacggatcgtgccggttacgagacgatggagttctatgacgaatgccagaaccgtgacgcacgccttgcccagacgatccgcacaccggggtatgaacgcgacggggtgcctgccgctcctaacttcaacggttattcctatacgggctaccaaccgatcaaatatacgttggatgataccaaatacgatgccggtgctttgaatacgaatgcgattccgttgttccgttatgccgaagtcctgctgaactatgccgaggcaaaagccgagttggggacgctgacggatgcggattgggcgaatacggtcggtgtgctgcgtgcacgcgccggtatcaccggcggtctttctgccaagccaaccaaggtggatgcttatttccagcaaaactatttcccgaatatttccgatccggtcatcctcgaagtgcgtcgtgagcgttccgtcgaactggctctggagggtttccgcttcaccgacctgaagcgttggaaacgcggtgagctgatgacgatgcgttggactggtatatatgttcccgccttgaatgtccagatggacctcgacaaagacggtacgccggacgtgatcttctataagggagagaagccgaccggtctgcctgcttcctgtacgcctgtttcagtaggagagggcacgcagcagggattgaccggggcggattcgggtaacctgacttggtcggacgatgatccgcgtatctggtacgacgatggtcgccagtattactacccgatccctcagtcggcaatcatcaaaaatggaaacctgaaacagaatccgggttggtaaatgtgtaatcgataaatgataaggatatgaaaaagacggtaagtgtatttgtttcggtccttctgctggcagctttgctccagtcatgggccatgaaagaatcccatccggccacaggcgggaggagcgaactgaacgtggcgactttcaacctccgtatggatacggaaaaagatggtgtgaatgcctggccgaaccgcaaagagatggtgaaaggactgatccgtttccacgatttcgatatcttcgggacacaggaagggttcaagcacatgttggacgggattgccgagttggatgggtatgcctatatcggtgccgggcgcgatgacggcgaggatgcgggcgaacattccgctatcttctataagaccagtcgttttgatttgttagacaaggggaatttctggttttccgaaacaccggatgttccgggcaagggctgggatgctacttgctgcaaccgtatttgttcctggggtaagtttcgcgataaggagagtggcaaggtgttctattttttcaattcccattacgaccatcaggggaaggtggcacgccgggaatcctccaaactgctgatcgctcgtatcaagcagattgccggaacggatgcgacggtctttgcgacgggagacttcaatgccgttccgaccgatgaaccgatggtgacgctagcatccgacggtctgttgctggactcgtatgacctgagcgagcagccgcgttatggtacggaaggtacttacaacagcttcaagacggattccgagatgatgaaccgcatcgattatatctgggtgacgaaggggacgaaggtgaaaaagtatgctgttctcaacgatatgcagtacggtcgtttcccgtcggatcattttcccgtgatgatacaagtcacgttttaaagtttatttgaatgacaggtacggtgtgagccgtttcttgtccgtatctgtaaattcttctatcaattgcaggttctcccatccggagagcttgcttttttgtttccggagctgttcgatcgcttttgcctgtcggtagtcgaggtaagggtgtttgcggagagcggtggcgggtaaggcgttgacctctaaccggcgtacatggagcgtgtcggcaatgaaccagggggcgagggcttggtagcgttcttcatcgatcccatacacttccgccaactggctgacatcgtagaagccccctaagagttctctgtatttcatgatccgccgagcgaaggtgctgccgatgccagggacttttttcaggatcgtagtgtcggcggtgttgagctcgacgagggttcccggcgcgtacttttccgttcgagtgtatagggtatatcctttcctcttcttgcctgtagggtaggagttgttacctgtaagggtaggacttttatctttaagggtattcttggttttattcggatgaggtccggattctttccggatgaaattttttcccccttcggatgtattttttccggtgatgatccgtctttcgcccggtgcttgtcggctttctgttcgatgggcatctgtctgcgcttcgataggcatccgtttcgtgtttgtccaaagcaataagatccaggaaatagtgatgaggcaaaggagtaaagccagtgctctccgttcgcctttggagaagtagagaaggtcgcgccagttcatggtaagaaagtattttttcgaatggttttggtctccataagacagttattattaaatgaatactattttacaaaggtataagttccctgccgatatgcaaggaacttacgggtttattttaaaatagtttctttagctggtcaagcaggccgagttcgtttaggaatacgatgccgatggcgatcggggaaacgtatttcatgaagaagacataaatggagaagagacggaacttgatcgtcccttcgttggtcagctcggctttcaggattttcttgtcgacacgtgttccgacgaagatgcaggtcagcattcctcctaacggcagcatgatcttggccgtcaggtagtccagtgcatcgaaaaagatcagtccacctatcgtgaactcttttaataatccgaacgagagtgaactgagaatgcctaagatgaatacaccgatcgaaacgagccaagccgctcttttccttgttatacggaactcttcatggatataggcggtcaccacttcatgcaaggaaatggtagaagtcagtgccgccatcgccagcaagatatagaaaataagcgaccacaagctgctgaacggtaactgctcgaatacattgggcaaagtgatgaataccagttgggcgcctgccgatggggcaatcccgaagctgaagactgccgggaagatcatgatccctgccaggactgccacaaaagtattgatgatcgtcacctgccaagctgttgccaacatgttggtgtctttcccgaaataagaagagtaggtgataaggcaacccatgccgagactcagcgaaaagaacgcctgcccgacggcactcagtacaacggatgaagtcagcttgctgaaatccggtttgaacaggtacaccagtcccgcttctgcatttggcagcgtgacggagcgtacacacatcacgaccaggataaagaacaggagtggcatcatgatcttggaggcccgttcgatacctttttccacacctgaggcaatcacgaaatgcgtcagtccgataaagactgctgtccagaagatcggccggagtgcattggaagagaagttgtcgaagccggcggtaaagtccacacccggcgtactgtagaggctaccgtttactgtctgccagacgtattcgagtgtccagccggaaacgaccgcatagaagcccaggatcaggaaagcggccaggatgccgttgtatccgatccagcaccatttcgtcccgggggccattttcttgaacgaaccgaccgtattgctgcgggagtagcggccgataaagaattcggttaccattaccggaattcctaagaatatcatgaagagaatatagataagcaagaatgcggcaccgccgttcgtccctaacatataaggaaaacgccagatacttcccagtcctacggcgcatcctacggtagctaggataactccgagtttactaccgaatgtgactctgttgtccaccatgtttgaatgaataattaagaattaaaaattaagaaataattgccctcttttcacttttaactttcccctttcaactgttgaaccgttccgtctttgatatggatcacgcggtctgtatcggttgccagttgctcgtcgtgtgtgacgatgacgaatgtctggtgcatctggttgcgcaagtcgaagaagagcttgtgcagctcttccttgttcttggtatccaggcttcctgatggttcgtctgcgaggattacggacgggttgttgatgagggcgcgggcaacggctacgcgctgtttctctccgcctgacagttcgttcggtttgtgggacatccgatcggtcaggttcatgaagtcgagaatctccttcgcccttttctcggctacagccggtttttcacgggcgatcagtgccgggatcatcacgttctccaaagctgtgaactccgggagaagctgatggaactggaaaacgaagccgatgttccggttgcggaatgccgccagtttttcttccgaaaggcggacggtttcggtcccgtttatatatagtttgccgctgtccggagcatcgagtgtcccgatgatctgaagcagggtagtttttcccgccccgctcggaccgataattgctacgatctcaccttcgtctatcgtcaagtcgattcctttcaatacttgcagggagccgaagcttttggttattccttctgtttgtatcatatcagttgaaagttgaaagttgaaagttgaaagttgtataaggaaaagaataacttctcattttcaactttcaactttcaactggttaataacatatgaggctaagtagcatccgaatattgccggcatataggaaacggttccggtcgttgttcgtttgcattgttcgccttccacttctacgacggcatcaggattggctatctcggtagagaagacaaccggaatccctttgttgacgcccagaccgcgcagtcgtttgcgtacggcttttgccaatgcgcagttgcaggtcttcgagatatccgcgatcctgacttgtgacgggtccatcttggctccggcacccattgaggaaacgacagggatatttctctgataagcgtgatacaagaggaatactttcggactgagggaatcgatcgcgtcgacgacaaaatcgtaccgggtcgctgaaagtacctcttccgtccgttcgtcgcgcaaaaattcgttcaggacgtttagtttcagacggggattgatatctaacaggcgacgggctacgacttcagctttcggcatccccaacgtcgaatgtaacgccggcagttggcggttgatattgctttcgttcaccgtatcggcgtcgacgatcgtcatatggccgattccggcgcggcatatctgttcggctgcataagctcccacacctcctagtcccactaccagcacatggctatgtgccagccgctccatccggtcggcgcctaacaaaagttccgtccgtgtgttccaattgtaactcattaaaatgattttggatgcaaaagtaataaatcaatcagaaatgccctgctatttagccatcttttaacgaaaaaggggcgatacactccgattgtgagagataaggaataattcgtatctttgtccgcaataaattcaaatacttatgaagatacaactctattggctgcttttggcagctttattgttattgcctggaaaagcaaacgccgcaaataacaagaaaccgtttgtcatccctgaattgcaggaatggagaggagctcgggggatgttcactcctacggctacatcccggatcgtgtataccggaaaagatccgtctgtagcccgtgttgccaatcagtttgccgaagactacgagctgatgttcggccgtcggatgcaggtcgtgcaaggtcgtgcggctgccggcgattttgtgttctccctctcgtccgacagccggttgggagaggaaggctacacgatgaagatcactgaccgcgtcaccgttactgctcctaagagcaaggggctgtattgggctacccgcacgttgctacaactgaccgaacagcagggtaatcaggctttgccgaaaggggcagcccgtgattatcccgactatgcgatccgtggttttatgatggattgcgggcgtaaatttattccaatgagcatgttacgtgattatgtgaagatgatggcctactataagatgaacacattccagatccacttgaacgataatgctttcaagcaatattacaatcacgactggaacaagacctattcggctttccgcctcgaatgcgaaacttttcccggactgaccgcccgcgatggctattatacaaaaaaggagtttattgccctgcaacaactcgccgatagcctaggtgtggagatcatcccggagatagatgtcccggcacattcgcttgcgcttacacagtataagccggagatcggcagcgaagagtatggcatggatcatcttgacttgttcaaacctgaaacttatgagttcgtggatgctcttttccgcgagtacctggaaggacgtaatcccgtctttaccggcaaacgtgtccatattggaacggacgaatattccaataagaagcaggatgtggtggagaaattccgtgctttcaccgatcactatatccgttttgtggaaggcttcggcaagcaggcttgtgtctggggagctttgacgcacgcaaagggtgaaacacctgtaaaatctgaaaacgtgctgatgagcgcttggtataacgggtatgccgatccgaaagagatgatcaaacaaggctatgacctgattagtatccctgacgggtatctatatatcgttcccgcagcaggctattattatgattacctgaatacggaaatgctttataaagaatggacgcccgcccatgtagggaaagaagtgtttcccgaaaagcataagcagatcaaaggcggtatgtttgctgtctggaacgaccatgcgggtaacggcatcagcacgaaggatattcactatcgcgtgtttcctgctatgcagacgttggctgttaagatgtggacgggaaaggattgtacggttccgtatgcggactttaacagcgcccgtatggcgatcagcgaagcacctggcgtgaacgtggccggacgtatcgggacggagccgcgttccgtttacaacctcgaaactttgaagccgggaatggaaacgggggtgaaagagattggctatcattataccgtctctttcgatatcaaagcggaggcggaggaaaagggaaccgaattgttccgttcgcctgatgccgtcttttatctgtctgatccggcttccggaaagttgggatttatccgggatggatatctgaataccttcaactaccagttttatccagaagagaccgcatcggtaaccattactggggacgagaaatctacgcggctttacatcgacggtaagttgaaagaggatctggctatccggaaacagtatttcaatggaggaaaagattcgatgaattatgtccgcacattagtattcccattggaaaaagcgggaaatttcaagagctcgatccgtaatgtggaagtgctgaactattgcaagccggagatgtaggcttaactggtgacaattgtggaattatagacggggcgtgtggattttttctacacgccccgtttgttttatggggtgacttcccgctttgcaagcgcttttatcggtttggcatggcgtttgtatttatgtcaatgtaatggagtttaggttataagaagattgtttagatttaggttttaagattatgaaaaagattgttttagcattagtcgttgcagttgttgcatgtgtggtggtatttgcatctcaggatgtgaagtgtagacaggctgctgtatattcatctttcgaacaggttactcccgatgggtttcggagaatagatatgcaaaacctcccacatgccgtattacggacaatgggaacctcttcttcttatgagggttgtacttttgaaggagcttatatgatggggaatcccggacatgaaacttataagatcgagattggtaatccggaccggagcgaggagtttgtgttgatgaacggccgtggagaagtgattaagtaagaaattatattggaaggaagtgtgtcgaaatctatctgtttttctatcaagaaaaagatgattttgacacacttccttttaggttattttattttccgataaatcatttccaaagccactaatcttgtcgttttgccggcttctatgcccggcaggtcctttccgctcagttttttccaagcggttagagttgccatatccaccggttcctgcaagcgagcatcccattcgggaagatagccgcgaagtcccagatattgcaccatgcggaagtgaggactcatataatccacatccttgaaatacataagcgtcgctttctggtcgatcagcttgtcctgcagacgggagaggtcgatgttctgcaccttcacctttccgtcaatcgaaagggctgaagcgataccggcggcctgtcccatcgccatccagcaaggctccatgcgcagggtggaaaatccgatgtgcgaacccgacaccgggacgggcaacaggaggttgcccacttctttcgggaccatcacgccataggggactgtgtatactgccgacggatagctcaggaagccgtccagatgcactcttccttcttctcttttccgtaccgcatgcgaatccaacgcataatggctcgccgttatgctgctttggtggatgggcgggcggctaccgatcgttaccggaatggcatcgttggcggtaaagaaatatgcaccttcgaaacgacggccttcacggacgtagacctggcgcgggaaatgcccgttgtccgcatattcgtctttcgaaagtccccattcttttgctgctttgcggaagtgggcgggcagttcggggtcgttttgggcgaaccagaaaaggccttcggtgtattcacgcagacgttgggcgaacttgtcgcgccattcccacgaagaggtgggccagggccagttctcctcaggcaggtcggtcgatacgaacacaccgtgctggttattggcgtccgtcttcatgttcgggacatggacgatgttggtgatcttggcgatcccccatttgtctcccggaagtttggaagggttgccggtcttgatatgtttccggttctcttccatcatttcgggtgtcacgcattgcatggcggcatccgtgttgcgtccggtccagacgtcctccacaatggaggcatagtcttcgcggttataatgggccggcttggtgaaagccacacggttcgccggattattggtcagacagaggcggtaattgtaagactgcacggcattgtctttcttgaacgtgctgccgtccccttccggaccgccccaatatttgtagacacgtccggctccgggctcgccgaactcgtctttcccttcgcgccctacgcggaaaggaacaccggcggcagcgccgaggtcaccttcgtaggtggcatccaggaatacagaaccggtgtattcctccatttccccggtttcgcggttcaggatacggatcttttcgatgcggttgtcgcgcatgactatgttttcatcttcggcatcgaactgacgcatggtcaggaccgtgatcttatccttctgcccgtcgagcattttctggaagatgcgtgctccgacggagggttcgaagtggtagccgtcgctgcatactttcacctgctcggagccaggaccgtaggtgtcgatatagtgttgtttcactccgtccacaaactcacggaacaagccggtcgttgcggcacgggtggcgatgtcggttgctccgagtccgttggcgggaagtccgcctacatagcgggtacgttcgagtattaccgattttttccccatccgggcagccgagatggctgccatgatccctccggggttgccgccgacgatcaccaggtcgtaggacgactggccgaaagcggtcgcacaggccaaaaggagggagagtacatgtgttttctttctcataaagtgctatttactgtttaatatttcttgggcataacgggcatagtggccttgcagaccgtcggcataccggcggagcaccttttccccgataccgtcctggtcgccgcataggtaaagggctcttgccaaatgcaactccttcaatgcgaggttacgggtagacgtgtcgttgaggtcggggaccgcattgctacgtgcttcggcaaacgaaaggatcgaatggccccgtacacccggtgtcgtcagcatggccagtagtacggagacagcttcgcggctgccgattgcttcggtggccatagtgatggcacggaagtgggaaagatagtcttccggctccagcttctttgctttttccaatatggtgggaaggacggatgtatcgcgggcgtttcccaatgcggtgataagggcatccaagcggctgaggcacatcccgaattgtcccatgccggtgtagtgccagccctcgtcccagtctttatattgccggatggcttcagccagtaccggggcatgtttcccttgtcctaagatacacaggatgctggcaaggatcactctctcttccggcatagtggctccggcgatttgtttgctggcgagctgtatgcaacgttcgggatcggtcagtaatatttcgagccctttataattatccgtcacgctggcgatagccttcttcatctcggaattactgaatcccttgaactctttatctgtcagcacccgttccggtaggttaccgatcttgaccaggtgacgttgtaccttcttgatgtctatctttcggggtgatttgttttccttgacacacaaggcggaaagataaccgactgcatatccctggttttgcaggcagggttgcatgcggatcaccggcatggcatcccggtgcgcacttgctcccaggccggtggtcaagataccttccaatcctttcggtaacaggcagcgcaaggggacatctgcatcataaatcttgtggcgcttttccggtgggtttaggatgaagagcgggtctatgatcataccgtgtgtatcgaacgaacttttgtgataagaaatcgtgtcgggatagcggcgatggttgatcacgtcgtataccgagatgatgtagtctccgattacccgccggcgttcgcgtgtctgggggattttgaccagatcgtattgtccttgcagcttggtcttggcttgcacaaaggcgcgtgagacatccagaatatccgtgtcgtctacgaacagccagtcgttgttgttgtaatagtcgcccggcgcccattttccagttcccgcaccttgtacggcgattgtttttttacctgtataatcgaatgccgctccggcagcaatggctatatctgcgcttccagtgctgtctatcaatattttggataggatgacgcctcgtccgaagggagtggcgactacgactccctttacttggcttccttctatcaaagcaccgcatcccatcacgccgaaccagagtttgcctcctgcctgtaacagctctttacgatgccattccattttccagtcggcagggaaacgtccttctcctttgggttgtcttggatggtctttaggtgccattgccaggacactcttgtctatatgagcggtatatccgcctcggaacccatcccaatagacaccgatcattcctagtgtactcaatcctccaagcccgtgcaggtattccaataccaatgtattggctccctgtttggctgcagatattccggcggacgcacctgctgtgccgcctcccatcacaactacatcgtagctgcctaaaaccggaagcgcacctgctggagagtcgacgaaccccttttgcagggacggacggagtggggagagcagttcgcctgtttgtccgtagtttgaagcgtttactttaagctggcggacagtggcctgagctggtacgggtatatcctttatctgcctggctactgtttcgcccatcatttctcctatgaacagggccggaacggggcgcatcactttggctgccaactctcttggtatctcagcacagggaccgagtacccataggtttgcaatattcttagatttgaatgcttgcatcggtaacttgcgccaggacaccggattcccgttatatgccttctcgctgttgatcgtttgtttcggaatataccagagcagatccgagctgtcgacctggtctatatcccatgtccggttacggatgatctgttcgacctcggccagtgatgcatacgagtcatctttgagcggtaaacggaatgtatagcgggtgaccggatagcttttctcaccaaccttgatgggctgggacagttcttcggctgcgataatttccggcgcttcctttttcgtattcccgactaccgtatagcagaattcttgtgaacctgcggtaaaaggtttacgttctgcccctaatagtccggcaacggaagcattgtgcgtcgcatcgataatcgctttgcaacggatagcctgtctgcccgaacggtttgcaatcacgactcccgcaggtttaccggacgggtccgtcagcacattcgttacatagctgctgtagaggaactgtacgttgttgtcgatcagctcgtcttccagcgttttctttatatgaagcggagtcgggaaatttttccccggaaagagcttgcgtgcaagtgctgtctgcagtttttccccttcctttcgttcgtagagatgtgagccgcatatgtcttcacccagatagggcatatagccaaccaggtaaactcgactgcccgttttcgctgcggcaacagcagcggcaatagcacgtgaacttccacccgcgaccacaagatctacttctgcaatcaccggaatcttacgcgccccttcatggcagaacccttcatctggaacggctgacttcatggccgcttttgcttccgtcacgctacctaaagaggctaatgcgcctccggctgccgttacttttaaaaaatcacgtcgtgtaatcatggtattctctttttatacttggtttttatgggaactataaagataagaattttattttttaggaactaatataatagcatcggcaaataaggcacccttcgaacggcagccgtcaatcttgatagaagatgtccagttgcctttctcaaacgcgtatgtgcctaaacttacccatgcacctttgtgagatctgggagatatttctacttgcttggtcccctctttacccgtaatgtcaaaagccataacttcgggcatttcctggtcgggaagagctgtgcagtaaaagaacacttcgtatgtatccgcctttttaataacaggcataaaggtgaaagagcaattgttcttttggttcgccgactttaagaagctgttcttataatgcgctccaaagcttttttgccaatgtccggatctttctattttgtcgatatcgctgtcatcgactaatatttcgggagtagaaccgtccagataaggattctctttcaggattttccttagcttggttacgtctattgtctggacgtcggtattatcgtcgatcgctaatgccgatgctacggctgccgactgtcccagcaccataaagaccggttccatccggatcgatccgaaagcgatatgggtggaagaaatacatacggggaccagtagattagtacattcttcgcgtttaggcgtaatgctcttgtacgagatcggatagggtgggaagccatgatattggacatccccttcattttttaccataccgtttgtaacgatacgttggcaattatgagagtccattccgtaggcggccattccgattgcatctcccacagtctcttccccttggcaatttttttgtgtcatgatatattccccgttcaggcgtcgggcttcgcgcacatatagttgggtcggaaagttatcattgtcaacaaattcatctttcgcccatccgaatctggaaacctggtcgcgaagtttggaagggactctttcatcgtgtgtgaggaaatagagcagtccttttgtatagtctacatgttcttgccagatccgttcgcgggttgcatagttgccatccggatattcgtaattcataccgatcatatcagttgatagtggtccgcgattattcacgtcatacttattatctggcatcataccccagttaaataagagataattatctatgtgtaaatccattttacggatagcacgtgccaatagttcatatttggccggatcatagttttcaggtttttcgaacggacgttgattttctttattgtcggtaaggcataaacggaaattgtatgcttgtacgagtttatctccacttcctctttctttcagtgtattaggttggattccccaacataagccactattcggatcgccttcttttagatatgggtctactccgtccggaaattgatgccagaaagacatttggactccgttaagagtctcgtcgtgttcttcgtttccttcacgtcctacaaaataagagacaccggcttttgccattaaatcgccttcatacgaacaatcaatgaattgtttggctttaacccgtatcaaggtctttttatccggttgttgggagtcttccaaagtgatactttttattcttttattctgaacttgagcatctgttatgcgacgataatacaggacatccaaatctgcatctttcacaaagcggttcatggttgcagtcgcgacacttgggggaaaagtccattgctcgaatttattataatgctctccaatacgacgatagaaaaggcgtgccaatccggtaactgcatatttgtttccgatatctgtcattccgagaccgccggtagtcatacctcctaaatatttgccaggctctaccaaaagaacggatttacccattttttttgcagagtaagcagctacaacacctgcggatgttcctccgtaaatacaaatgtcaacttctctgatagaagttaggctgtcctctttgccggattggcaagaaaatagggagacacagaaaataagaaagattatttgatatttcatgtgattatttttattgataagttcaaaaaggaatgagcgaataatcccggaatagggaaattaccccggatgtaatttgatgaagatatccaatcgccatccggggtaaatattagagatacaaatttattcgtaattaggattctgagtcagattcggattggtttgtctttcgatatatgggatcggccataaataatctctattcttgtcgaatttacggatatcgacaacacgcattttaaaatctgctgattctccgctttcagcaatgggaataccttcataaaaagctgtaccccattcgtcgatacgcggtgccttatctggataagacttcttcattctacctaaaagaggttgattcattacggtttcggcaattttccaacggcgaatatcgaacagtcgtaagccttcgcctgaaaattcatatttacgttcgcgagcaaccgcgtagaataattcgtttggatcggttgttgtgatcggtggcatcttaacagaaggacgttggcgaactttgttgatcgcttccaaaacggatgcatcgatttctccagcttttattttagcttcggcatatgttaacaaaacttccggataacggatcaaaattgtattcatatcacagtcgttcaatgcatctttatcttctatattagcatatttacgccagcaaataccggtaaatgtcgcataagcatgagtcgcttccagattgtctacacgctggttagtcatataattccaacattttgtactgtcgccatgagtttcgaattggaaacctaaaaactccgaaccggagacggctaacgtatatcccagacgtggatctctgttttcatacggatgtttgggatcaaacatcggagatttatcaatttgttttccatctatacattcccaggtatcggccagttggtaagctggtttcttattcgtatgtgctaacgcattacgagaaccaaacaaacgataaagggcatgtacttttgttcctaatagatattgtacggagaagataacttctttcgatgtctgcccttcatatttaaaaagtttagaatagtcatcttctatgatatattctgttccctccattgctataactgcttgtgatgcggaaatagcatcttgccagcgttcattgtaaagagctgttctagcttttagagctaaagctgcgccttttgttgcacggccggaagttgggttatttgtcgaaggaagattttcagctgcttctgtatattcctttaagatgaagtctactacttcgcttttgggagttctgggttgttgccctgtttccaatgtcaatacatctgtaatcaaaggtacatccccatataattcgattaagtacgaataataaagggcacgaaggaattgggcttcagccttgatctgtgcgtaggttgctggggctacgttatcttcacctctagacatgttttgtagaagataattacattttgcgatgcctgcataaaaagctttccaataattttttgcgaggtcactattggcatcggcagctccttgtgccatagtttgtaaggcgctcgtattacgatcatatcctatatcggaggcctcatcgaacgataggaagaatgtcatggtttcgaagtctgtccataaagctgtataacaggaagccaaagccatttgcatttctgtttcggtcgctaaaaaagtttgatccgaaggagagttcagtggattcttatccaaatagtcactacacgaattcatacataaggcagaacatacggtagctacatataaaattacttttttcattttcagatttaatttaaagttgaacattagaacttaagatctacaccaaagcttatcgtttttaattgtggataatatccaccattaccgataggagcttcaacatcgaatccatcccagaaactgtctattgtcaacaagttgttgccacttacatagaaacgtaaataagatattggagtttttcttaatacatttttaggcagtgcataacccaactgtacattttttaaacgaatataagctgcattcttcatccaaaaagaggagttctgcatattgtttgtttcgttgaatgccaaacgtgggaacttagcgtttctgttctctggggtccagtagtctttatgttgttcctggactgtaccgccttcgatgaaagtctgaataccttgaccattgatatagccgtcggcttttccgactccttggaataacatacttagatcaaatcctttgtaatctccgtaaagtgacaaaccaaatgtgtaacgtgggattgttccaccaatgatcttataatcggaagtattgataacaccgtcaccattctggtctttgtatttgatatcaccagggccgaagtttccgtattgagtagctcctaaataatttccatcggcatcgtaatcttccggttggatataaccaatagcttccagtccgtagatggagtacatttcgtgcccttcacggttaactgttaaacctgtttggtttacacctctcatatctagtattttattgcgtacatcagaaatattgaaagaggcacggtagttaaaatctccgacttggtctgcatagctaagagagacttcccaacctctattctccatcttacctgcattctgagacggggcatccataccgataataagtggtacgtttagtttcatcaaaatatcgtcggtcaccttgtagaaataatcagcggtgatattcagtttaccaaataaggttgcatcgattcctatatctgtggaagtcgtagtttcccacgtgatttttctgtttgccatattcgtgattgctgcaccggatgatatcgttttgtcgaatatatattttgtgtccaaattaacatttgaggagaatgggtatggatcgattgcagaattgtcagcattcattacgttttggttacccaattgtccccatgatgctctgaatttaagattgtcgataatatttctgatcggttcccaaaaagcttcttctgatatacgccatcctgcagatacagaagggaaaataccccatttatttccttctgcaaaacgggaagaaccatcataacgcatattagcttcgaaaagatatttaccttgatagtcataattgatacgtccgaaaatagaacgcaaagaccattcgtaggaattaccgtatgctttttggttttcttctccaccggcatccaataccggataatcggggaatgcatagttttcacgatagcctttatgcatatcatagcgatggtcttcttgctggtaacctaccattgcttttataccgtgatcattgaattgtttgtcaaatgttgcagaagctgtcaacaaatttctcaagttcctcgatgtctgatcgttcagcgtacttttttgtggagaacgataataaggagaaccgtcgtacttataagtctgaactacttttctgaaatcagacgtatgattttcccaataattggctgcatagttaccctggaaagtcaaccattcaaacggttggtagttcaatgcaacattgacaactgcggttggtttccgttgtttttttaaacctccgtcattggtgaaagctatggggttgtccccgttccagccttcaccccattgtcctgtgctaaggacaccggcttggatggcaggaatacggctcatccaatggaatgcatctgttctggacggttctttctggtcgatcatattcaagtgtgcatcgatacgggcggacaaggtagatgaaatatccatatccgtattcatgcggaaggtataacgtttataattggaattctctatgataccttgctggtccatatagccgaaactggcatttgtacggattcgttttgaacctccacttaatgtgacaaaatgattttgcatcaaaccactgttagtcaaacattcgtcataccagtcagtatcgggataacgatccggatctgtcaatatgccctgacggtattccttgatatattcgtctgaatagagaggagatttaccgatattggtataggctgtatttgtcatcagcatgtgatcgatagccccgactttgtcaggaaggtcgatcgcgctctgccaaccaacataaccgttgtatgaaacagtaaatttatccgcttctgcacgttttgtggtgataagtataacaccattggctgcacgtgaaccatagatagcggaggatgcagcatctttcaaaacggagatagattcgattagagaaggatcgatgtcattgattcccatctcaactccgtccaccagaattagggcgtcattattgttcaaagtcgttttaccacggatgctgattgttcctccgtcagctcccggttgtccgctacgttgtgtgatggcgacacccggaatgaggccctgcagggccattgaagtttgaccaacctgacgtttggtcaaatcttttatagagacagatgttaccgaacctgtcagatttgcttttttctgtgtaccgtaaccaacaactacaacttcgtcaatatcttgtgtgtcttcaatcaatttgatgttaaataagtttttgtttcctacttgtatttcttgtgaaagataaccgatataagaaatttgtagtatggaagaagatgtgacattgagatcgaaattaccttcaatatcagtgatgataccgttggtcgttcctttttcaattacgtttgcacctataataggttcgccgtttacatctgttattttaccggtaatatgttttgtttgcttttgctgggttgcatatgctttccgagtgatgttgatattgcgatcgttgatcgtataggttaggtcggtaccgaccaatgcttgtgaaaggacttcatcgatttgtttgttttttatttggatgttgacttttatatttttcacttcttcatccacataaaagaaaagaaattcactttgatgctctatctgggagaataggtcggtgagggatatttgctctgctttgactgatatggtagcagattgggaataagatgattctacagctaccatttgaaacagagccacgaataataagataaccgtgattctcataattgtaaaaagtttttttaagcctttgggtaagaaagacttgtaatacgaaacattttccatatttttgtactgatttaaagattgataattcgcttcatccacaatgtttggtcgcggagcggacggagcggaaaattaaatttaatgattttaaaccggttgtacccttaggtaggaccggttttttaggttaacactggtgctacttcataggcattatcttttaagtgttgcatattgtatgtaataaactctctcgctgttgtgccaccggatgggtaggctacgggaaatgacttttaggatctgctcgatactttgttcttgactgaaagtcccggaaacagtcacggcagggttcttcagttcctggctgtcgatctggatttccactttatatgcactttgcagctctttgataagttcgacgaatggaatcgatttgtatttcaacagaccgtctttccaggcagtgaaagtttcggtgtctatttctttgacatccaccttgtttgtcgaccggttgaaagtcagttgttggtttggggtcattacgatattttgctttgcgccttcgaaacggatggaaccttccacaagggttgccgtgatatcgtctgactctgcatctgccttcacgttgaagtgcgtacccaatacggtgatagaagcaccgttcatctctacttggaagggcttgcttggatcttttgccacttcgaaataggcttcaccttctaacttgacgttgcggctgtcttttccgtatttatcggaatagctgaggcggctgttcttgtttaatgtgatgacggttccgtcttccagtgtgaagttggaggtatgttcgtctgtcagcaaggtgtagtgttcggatgtacggtcatttgtattataaaggaaaagggctgttgagaaaatgaaaagcaaacaggctgcggcaattagtggaatggcgtttctccatagttgccgccgggcagtctgccttctttgtacattgatcttttgttgcagtttgtcggccgagagagcaggggcaacggaatgtttgaaagcgacatccgcatcccaataattcttgagacgtcggaattcatctcggtttttttcgttttcgttcagccattcgcttaacgaaaggatatcgtccgaagaactttctccactcaggacacgtgcgattatatggtttattctgttttccattctatgtgtttctatatgtatagtcgcagggaagcgagaattcccttagtcagaatgagaaaaagatagaaaattttcatctgttcccattcggagaaaataaatttcctactgtgggaaaatttattttcaataggaggaaataatattttcaataggtggaaacaaatgtttcctgggcatgaaacagaagtatcctatgcatgaaatttttgcttcatgccagagtgttgcttttcagatgcaatcgtcggcaagtgtttcccgcagtttgcggacggcattcgccaagtgtgcttccaatgttttgacggagatgtcgaggatggcagccacttctttatatttgagcttgtcctcgcggacgagtttgaaagccattttgcatttggcgggtagcgagtcgattgccaagttcaggcggtgaattccttcttggctgataagctcttcttcgggagtcgtttcggtcgatgtgaaaaggtcgatggagatttcgtccagcgatacctgctccatgtgttgtttacgataatagctgatcgccttgtggcgggctaccgtatatatgtaagaatcgaaattagagatgccgggtagctgtttgcggttgttccagatagctaagaaggtatcggaaacaatttcttcggcttctgccggggatgagacatacatgcccgtaaatcgtattagtggcccgaaataggtcatgtaaagcgatttaagagcggtttgtgaatccgataaggccatttcacaagcccactgtatgatatcgtctcgattctctcccaagtgtgagcaagattaacaatgttcttataataaaagtcgcgaatatagcgaaaatcccttagtccggtaacattatttttttattcaactgtttctgtggatgtatggttcgacttgtaacatgtttgtaatatctatgtcatttttgcgtaatatttgtttcagacctttgcaaccaaatacataacaagcaattatggagacattctatctctttctgatcattttcctctttgtgctggcggtgtttgacctgtcagtcggagttagtaacgatgcggtcaatttcatgaattcggcaatagggtcgaaagctgcatcttttaaagtaataatggtgattgccgcgatcggcatctttgtcggtgcttcgctatccaacggaatgatggatattgccaggcacggaatttaccagccgcaacatttctatttttcggagattatgtgtattttgctggctgtcatgctcaccgatgtggtgttgctggatatttttaactctctggggatgcccacttcgactaccgtttcgctggtattcgaattgttgggtggtacggttgcgatttcattaatcaagattgccaattctaatggtgcactccagttgggtgacctgctgaacacggataaggcttttacggtgatactcgccatttttctttcagtggcgatcgctttctttttcggggccattgttcaatacatttctcgcttgatttttactttcaactacaagaaacacatgaactattttatcggcttgttcggtggtttggctgccacttccatcttgtatttcatgttgataaaaggtttgaaagaaagttcctttatggaaggtgatcttaaaacgatgatttatagcaatacagacacgatcgtgtggggagcacttatctttttcactttattgatgcaggttcttcactggttgaaggtgaacgtttttaaagtggtgatcttgctgggaacgtttgccttggctttggcgtttgccggtaatgacttagtgaactttatcggtgttccgttggctggctattcttcttatatggatttgatggcgcagggaggcacgactacaaccgacactttcctgatggagtcgttgcttgaaccggccaaaaccccgtggtacttccttgttggttccggcttggtcatggtgattgccttggctacttcgaaaaaggcgcaggcggtgatcaaaacgtctgtagacctggcccggcagtcggatggaaatgaaaatttcggaacatcgcccgttgcacgtgttctggtgcgtacgtgcaacaatgcctccaatacgatattgagcgtggtgcctttgcgagtgaaggactggattgacagccgtttcaataataacgagataatacttgaagataaggccagtttcgacttggtgcgtgcttcggtgaatgtcgtgctttccggtctgttgattgcgttgggtacttcgttgaagttgccgttgtctacgacttatgtcgcttttatggtggcgatgggtagttctctggccgaccgtgcctgggggcgtgaaagcgcagtttaccgtatcaccggtgtgctctccgtgatcggtggttggtttattacggcaggtgcagcctttacgatctgtttcctggttgctctgttgatccatgtcggtggtattgcggcaatggcggcgatggtggggctggcgatctatatgctgatccgtaaccagattctgtataaaaagaagatgaagaaggaagccatgcaggaagaagttgattccacgatttccaaactacgtgagacaaaggacaaacgtgaagctctttcgctgttccgtgaacatagtcgcgacgagctttgtgacgtgctgaacttcgcttccgacactttcaaccgctctgttcatggctttatggatgaaaacctgcgcgaacttcgcaaggttatgagcgcgattgaggaaaagaagagttacttgaaacaggtcaaacgtgtcggcacgttgggcgttacccagttggagcatgatattgcgatcgataaaggtttgtactattatcaggggaatgattttgccagcgagatcgtgttcagtatccgtcgtctgacggagccaggcaaagagcatgtcgacaatcattttagcccgctttgtgaagtacagaaggaggatttcggaaagatgaccgatgagatcgtttctttcctgaaccgcagttcggttatgatcgaaagcaatgattaccatcgtatggatgacctgattgccgaatcggtcgatctgacggctaaactgacgcttctgaagaaggaggaactgaaacgtatccaaggacagagcggtagtacgaaggtcagcatggtctacctaaatatggtacaggaagcgcagaatgtggtatcttttacggctaatttgctgaaagtgagccgtaagttccaaaaagaataatcggtgtgttacttttctcttgaaagaaaagtaaccaaaagttcaaggcttaaccgtctgggctactccgggcaaagactacgctgtcgcctgcccggagtagcccagacggttaagccttgactttttggttacttttgggacaagccaaaagtaattataacgatagcattgtcttttctttgacaagatcactctcatccatctgaagcgaaggaaccgtgcacatcttgatgtagtcgccggtctgacaggtataatcgtaataagcctgttgttcggaggtgaaatcctccttttggatcaagccgctttccatggataaaaattcttccgtatccgtgcagtcagacttcttgataagtaggatgcggcgtgcaaccgggttccggttgtagtcaagtccgatatataaaccgcgcagttgccggggattccggaaaaatgggatttgcagatagattgttaccagcgtgaattgaggcgaggggttttcgctgaacatgcaataaaagttctgtggatcacctgtgactcccatgccccattgcgcctccccgtaagcatttaaccgtccgatgcggatgtactccttgttttcggatagactgatgataaaaggttccatcttcaggcagtccgaggaagaagaaaggctgtaactcgtgtaaagtccgcatatgttgtccacccgtgtggtggaaagcagtatttcttcttgcaaatggtcgaggaaaggattggctttccggtcgggttgtatgttcggttccatcccttccaagcgtttcaacaattccggcaggacggacagcaggcgtcgtttggatatgttgttgaccaatacgatcgcatggtccaatgcttcctcgtgcgagcagtttttcagttcctcgaaataagtcgggagcactgttgtgtacagagaagacaggatgctgggagccattccggcacagtcggcaatctccttcatcttgatcccgttattgcgcagatattctatccggcggtagagttcacggaagtcatccatgttgttcttatttactgttttatattgcaaaataaatacaagcgtgttgcatttccgttacatgaatgttacataaatattgctttataatcggttgatttataatatatataaataatgaacattcatgttttcagtaatattcctgtaacatgccacgtctacttttgcagccgtaaacaaaatgacagcatgttatgaacaacgaacaacaaactaaaaatccatctcggaaacggttatccgattttctttttatcctctgggccggcggtgcggctcttttatcttattcattggtatatgcactgcgcaagccttatacggcggcggctttcgaggatgtcgagttcttcgatatggattataaggtggttgttacgatctcccagatagtaggatatgtgatttctaagtttatggggatcaagctgatctccgaactgagacgggaagagcgtttgaggtttatcctgatgtctgttgtgatggcagagctttcgttggttttcttcggtctgctttccgctccttacaatattgcagctatgttcctgaacggcctgtcgttgggttgcatgtggggggtgatcttcagttttatcgaaggacgtcggatgacggatatccttgccagcctgttaggtgtcagtatggtgatcagttccgggacagccaagtcggcagggttgtatgttatgaataacctgcatgtgaatgagttttggatgcctgcattgattggtgctgtcgcactgcctctgttagcattgctcggatatgccctgaaccgtctacctcaaccgaccgaagaagatattgcgatgaaatcggagcgtgcgacattgaatgggaaacagcgttgggagttgttcaagaattttatgcctttcctcatgatgttgttcgttgccaatatagccatcgtggtgttacgcgatataaaagaagactttttagtgaatatcatcgatgtttccgaatattcgccttggctttttgcgaagatcgacagtgtggtgacacttattatccttgtggttttcggattgatggtttttgtgaaggataatctgaaagctctttctattcttttcgggttgattattatggggatgatcgtgatgtctgttgtctctttcgggcaggaacggttccagctttctcctgttgtctggctgttcgtccaaagtctttgcttatacatcgcgtatcttactttccagacgattttcttcgaccgcttcattgcttgctttaagattcacgggaatgtagggttctttatcgtaacgacggattttttgggatacaccgggacggtgcttgtgcttgtgctgaaggaattttgcaacccgcatatcgattgggcggtattttataaccagtttgctgggtatgtcggtatcttctgctgtatcaccttcatttgttcttttgtatatttgcatcagcgtttccgtaaggaaaacgggttggttgtcaagagcaacgaagtgctcgaattggatacggcttcgcagaatgcgatcacgatggcttgataaacgaatcagtataataaaagaaataaatcagttatgaaaaagatttcatgtgtgattatggactgggccggaacggctgttgatttcgggtgttttgcccctttgaatgctttcctgaaagttttctctgaagaaaaaggaattgatataacctaccggcaggcgcgtgagccgatgggattgttgaagatagatcatatcaaggcgatcctgaatatgccggaagtaaaagccaaatttcaggttcgctataaccgcgactggaacatggacgatgtaaacgaaatgtatcggagcttcgaaaagcatttgttctcgtctctccgcaactttacggatccgatccccggtgtgctggatacgatgaagctgttgcgcgaagaaggaattagaatcggttctacaacaggctatacacaggcgatgatggaagtggttcgtcccgatgcggcagctaaaggctatgtggtggataacctggttactccggatgatgttcccgccgggcgtcctgccccgtatatgatctataagaatatgatcgacctggctattccttccgtcgataatgtggtgaaggtaggagacacgatcgccgacatcaaggaaggagtgaatgccaaagtatggagcgtcggtatcgtgaccggtagcaacgagatgggattgacagaagaggaatacaaccaccgttcgtccgacgaactgatcgaactcaagcgcgaagtgcgtgaacggatgctgaatgccggtgcccattttgtcttggacaacattacggagctcccctcctgcattgagaagattaatggtaaatattgatttataataaggatatcatgaatacaaaaagaaattacctgttgcttaccccaggtcccctgagcacatctgaaacagttcgcgaagcgatgcttcaggactggtgtacttgggataaagattataacgaaggaattgtaacccccatccgtaagggcttgttggctatcgccggactggatgaagacgaatatacggatgtcttgttgcaaggcagcggaacatactgtgtggaggccaccatcggtgcagccgtgaagccgaccgacaaacttctgatcctggcgaacggtgcttacggcaaacgtatggcacagattgcggaatactatcatattgaccatgtactggtctctttgcacgagacggaattggtgactggtgaagtggctcgtaaagccctcgaagccaatccggatattacgcacctgtcgatggtacatagtgaaacgacaaccggtctgctgaacccgatcgaagaagtggccgaagtcttgaaaggtcgtaacatcacctttatcgttgatgctatgagtagctttggcggtgtgccaattgatatgaagaagctggatatcgactttttagtcagcagtgccaacaaatgtatccaaggtgttcccggtttcggttttatcattgcgaagaaagataagctgatcgcaacgaaaggaaatgcccgttctctctcgctcgacatctatgcgcagtgggaaacgatggaaaaaggcggtggcaaatggcgtttcacatcgcctacacatgtggtgcatgctttttatcaggccatgaaagaactgaatgaagaaggcggtatcgttgcccgttcggaacgctataagcaaaaccaccgtacgctggtcgacggtatgcgtgcgttaggtttcaaaactctgctgccggatgcttcgcaaggcccgatcatcacctctttcctgtatcctactgccgatttcgatttccattctttctacgatcagttgaaggcaaaaggtttcgtcatctatcccggtaaaatctccgacgctgatacattccgtatcggaaacatcggcgatatcttccctgatgatatggaagcacttttgcaggcaatacgatcaataagctactaaaaaatttcaataaccttgtaaatagttcccacgtacgggaactattttgccgttaagaaatagcaaatcgatagttgtaatgtaagaagatttttgttcctttgggggcgaaaatcaataaggtacttagtgaaatcttttatttgtattctgctggcattattccagtttacaatatttacagcgataggggcggttggtgaaccgcccttacatgaattgcccctaaacctttccctgtccgatgcaggggtacgggatagcacatcccggatgtctgtcgtcgaatataaattcaaaccgaaaagcctgatccttcccgcttccctgataacagtcggagcgattggcactgccatagacgggatgaacgatttccatctcttttcccgcaaggattccgtcaagaagatacggatcgacgattacatggaatggggcatgttgggttgggtttttgtctgcgacctgatggggaaggagaagcataattgggtggatcagctttgcctggttgccattgccgaaggcttcaacgctgccatgacacgtacggtcaaatatactgtaggcgaaatacgtcctgacggtggtcctcactcgtttccttccgggcataccgccaatgctttcttaggggcacatgttgcttggaaggagtttaaggacagctgcccggtattagcctactctggctatgtgttggcgaccttcgtcgcttgttcgcgcctgtacaacaaccgtcattgggtggctgatgtgattgcaggagccggtttcggtattctctctgtcgagcttgcctatttgacctatttccctatccgtaatgcgatcgctcgtaaaatcaatatgaaaggaaatgatcgcttggtcgttgctccaacgtttagtcctgatgggggcggcctttatctgtcatggaaattttgaagatttatgatttatgaattattatcgacatataaatcatgaatcacaaattttccccaactcctcgataaatgtccggtcgttgctgaggcgaggtattttgtgttgaccgcctaattttcctttcctgcggagccattcgtagaaggtcccttcacgggcaactcggatttccagcggttggagggaaatttctttataacgttttgcctcgtagtcggaattaagctgttgcaaggtcttgtccagcaaggaggcgaaatcatcgagtgaaggcggcattttctcgaattcgatcatccattgatggcggccctttgccttgtccagcatgaaaaggggagcggcggtatactctttcactttggctcctgtctggcggcaaaccctgctgatcgctttgtcagcattgtctaccatcagttcttctccgaaggcattgataaagttcttggtgcgtcccgatattacgaacttgtgcggataaagggaggtgaaacggactgtgtcgccgatctggtaacgccataatccgccggaggtcgtgatcaccatcgcgtagtttttccctacctctacagcttctaacggaaggacggtcggatgttcttcccccacttcgttaatcgggataaattcataaaagacactatagtcgatcatcagcaaaaggctgtgttcctccggattgtcttggaggccgaaaaaaccttccgatgcattgtaggtctccatgtaatgcatccggtccgaaggaatcaacgctttgtattggtcccggtacggctcgaaactgatcccgccgtggaagaatacctccatgttgggccagacatccgtcaggtattcgcttcctgtcttttgtaatacggccttgattagtaccagcatccatgagggaacaccggataggctgttcacgtcggttttccaagtgctttcgacaatcgccttgatcttgctttcccattcatccataaggatgatctttttgtcggggacgcgaatcaggttgacaagaggattcaggttctgcaacaggacggcagaaaggtccccgcaatgtgcattccggttcaaaggggaaggactgtggcttccgcccagtatcaaccctttgctggcgaaaaaatggctgtcgggattattctgtagatagatggaaacggtgtcgaaaccgcctttgtaatgacaccctttcagaatttcgggtgtgacgggaaggaacttgcttttgtcgtttgtggtgccgctgctttttgcgtaccatcgcacgaccgaaggccaaaggatatttctttctccgtttatcatacgggtgacgtatggttttatgtcatcataggtctgtaaaggaatccgctcacaaaagtctgcatatccctgaatacttttgtagtcgtgttttaaaccccattcggtatttcgggcggtagataaaagggacttcagctgtttgtgctggatggcatctgcatcctgggcaaaccttgcgatctctttttgcctggggcggaagagtagtgatattgtatttgtcagaatatccatgctcctgttgtttgaattgcatgcaaagatacgataaatttattatctttgtacaacaagtacttaatcccaaaaaacgatgaaaataggtattctttcctctggtggcgactgtcccggaataaacgccacgatacgtggtgtcggtaaaacggccattatgcactatggcatggaagtcatcggcatacacagcggctttgtcggcctgctgaataaagatgtccagacttttgacgaacgcagcctttcaggtatcctgaatttgggcggtacgatcctggggacttcccgcgagaaacctttccgtaaactcctggcttcaggcgaaagcgagaaaccgcagctcattaggcagaattatgaagaactcggcttggattgcctcgtctgtatcggcggcaacgggacacagaaaaccgcaggtatgctctcggcgatgggtttgaacgtgatcggtgtgccgaagactatcgataacgacatctgggggacagatataacgttcggtttcgatacggctgtcaatatcgcgactgaagcgattgatcgcctgcattcgaccgccagttcgcacaaacgggtaatggtggtggaggtgatgggacaccacgccggctggattgcgctatatgccgggatggccggaggtgctgatgtgatcctgctacctgaactgggctttgacatggaccagataaacgaagtgatcttggaccgtgcccgccgtggtaagccttattccatcgtggttgtggccgaagggatcgaaatacctgacaaagagcgtccttccgtctatgtgacgcgtgtcatagaggaggcgacaggtatcgaaagccgcgataccgtcttggggtatattcagcgtggaggcaatccttctcccttcgaccgtaacttggctacccgtttgggcggacatgctacggaactgatcgcaaacaggcaattcggacgtatggtttgcatgaaaggcagtgaagtcgaatcaattcctctgtctgaagtggccggtaagttaaaactggtaactcccgaacatgatctgatcattcaggggaaacggatgggaatatcgttcggaaattaattttcagcgggaacagcttctatgcttgtttccgcttttcttttctctgtatctgctatctcctgtccgctattttctacggcttcttcaggtagattttcgaattcgttttcggctgtgttctcaccggtttttttcttcttgagttccgatatgaattgttggaatgttttgtcagtccgtaatttcttgatcgccatcttggctgcgctctgctgggattcctttttcgaatagccgatgcctacgcctatctgtgtgtcagaaagcgtcacacctgtctggaacaccggatttccatcgttgtcggtaaacgattcgattaggtcgaacgatatttcaagcttgttcttttggctccattcgatcagactcgatttgaaattgacttctttacgggcgatggtttccagattgacatattttttgatgagcacgttctggatgaaattatagcagacttcgtagccctggtccagatagatcgcaccgatcagtgcttcaagggcatttccatacatgtggttgttatgggaacttagtttggcggagtacacgaccatcttgtcgagtcccagttcgacagcaacacggttcatcgtctcgcgctgtacgattttggaacgagtgttggtcaggaatccttcccgcttgttctgaaagtgtttgtaaacgatatcggctacgaccgcatccaatacggcatcacccaaaaactccaaccgttcattgttcagccatctgccgtcaccgctttctacggaagaagatttatggaggaaggcttgttcataaaggtggatgttatcgggataaaaaccgagtatcttgtataaagaagaataaggctccttgttcatgttcttgaggagccttattcttttgtatagctttgtaaacacgttacttcacaaattttttaacaatagcacaagcgttgtgacctccaaacccgaaagtattggagagtgctgcccgcacttctcttttttgagctttattgaatgtgaaattcagtttataatctatttcaggatcatcatcaccatccgcatggttgattgtcggaggaatgataccatcgtttatcgccttaatgcagaacattgcctcgatcgctccggccgctcccaagaggtgtccggtcattgatttcgtcgaactgatattcaggttgtaagcgtgatctccgaaaacttccttgatcgcttttacttctgagatatctcctaccggcgtagaggttccgtgaacattgatgtaatctatgtcttccggagtcatttctgcgtcttccagtgcgttacgcataaccaacttggctcctaatccgtccggatgggaagctgtcaggtggtaagcatcggcagacatgccggttccggcaatctcgcaatatattttagcaccacgagccaacgcgtgttccatctcttccaggaccagacaggcagcaccttctcccataacaaacccgtcacggcttgcgctgaacggacgggaagcggtttcgggcgaatcgttgcgggtagacagcgcgttcatcgagttgaacccaccgacaccagattccgaaacggcagcttcggcaccaccggttataattacgttagcttttcctaaacggatatagttaaacgcgtcactgatcgcgttggttgaagatgcacaagctgatactgtcgcaaagttgggaccatggaatccgtaaagcatggagatatgtccggctgcaatatcggaaatcatcttcggtatgaagaacggattgaacttaggaccgatcgtgtctttgatctttgcatatcctaatacttcttcgtcgaatgtcttgataccaccgataccagaggcaaagataacgccgatacggttcttgtcttccttgtccaagtccatagcagcgtcgtcaatcgcttgttttgcggcatttattgcgaataaactataacggtcacatttgcgggcttccttacgatccattactgtcaacggatcgaagccttttacttcgcatgcaaattgtgtcttgaatttggatgcatcaaactgagtaataggcccggctccactcttcccattgataataccttcccatgtttccgggagagtattaccaagaggagtaatagctccaagacctgttaccacaactctttttaattccatacctttaattaaaaggattgattacttcgcgttagcttcgatgtaagcaatggcgtcgcctacagttgtaatcttttctgcttgatcatcaggaatagaaataccgaattccttttcgaattccataatcagttctacagtgtcaagagagtctgctcctaaatcgttagtaaagcttgcttcgtttgtaacttctgtttcttcaacacttaatttatcaacgatgatagcttttactctttcagcaacttcagacataactttttcaatttagattaataaatacgaatatactttttaaatttgcagtgcaaagaaaagaattttttatgttacaaaacaaatttaatgagctaaaaatgcggaaaactgcacattttttcttttcttgtgcacaaaaaaaggagaaaacatgaaaaacgtagcaatttttgcttccggatcgggtacgaacgcggagaatatcgtccgatatttctctaaaagtgaaactattaaggtggcagttgttttgtctaacaaccggaacgttggtgtgcatgcccgggtgaataagttgggtgttccttcttttgtcttttcgagggaggaatttgcagatggggcgcctgtcttggcaaagcttgcggaatatgatacggatctgattgttcttgccggcttcataaataagatctccgatcccttgttgaatgcctatccgggtaagattatcaatattcatcctgcacttctgcctaaatacggaggcaaaggcatgtacgggatacacgtgcacaaggcggtcgttgccgccggcgaacgggagaccggtattacgatccattacatagacgaacattacgacgaagggacggttatctttcaggcaaaatgccccgttctgccgtccgatacgccggaagaggttgctgcgaaggtgcacgcactcgaatacgctcattatcctaaggttatagaagatttgcttgcagcccgtatttgagggattgtatcagaagttcgcgctcagctgcatgacataggtacggggtgcggaaacgagcatcggacgtgtactgtattctttgttgaacaagttattcaccatgaactggaaagacagtcctttcatgatcttcacgcctgcacgcaggtcgaccacacagtagggcgtgttgtttttcgcccaataggaatgaagtgtttgcccgttcacattgccgaagaggatgtcgcgcacgtagtccatgatctctggttgttcttttgttcgctcgtccaccatcaggtagtctacggccaacgtcttacttttccacacgatattggttcctagtgtcagccgtttccattggaagtcaaggatggctttcactgtgtgtttttggcggtacttcaggtatttggatgtattggacttctctttcatctgcatcggatcatcgtaggtcgcctcttcttcgttctttttcttataatcggcgtcttcaggttcgatgaatacatatcctaagttgtagcttagcgtggtattgggattgaacgtgtagacaccgttcgtactgacttccgccccgtagatacgtgctttcgacacgttatagaactgggcgccgaatcccggcatctggccttgggtgatcatgctcaagaggtcgcgcacaccgttgatatactgaaaagtcgtattgttgaagattccgaagcgaaattcgatcatgtcggtatattgggtataaaatcccgccaagtcgaagaatcccgtcaggtttccgaacttatatccctgtttgaagcccagttcggcatttacacctttttcggcattcacctctttgttcgggtacacgccgacaccgccgatgtccttacgggcatatttctcggtcagagagggatagcggtagccttgcccgaagctggcgcggataaagctgtagtcggcaagttggtagttcagtccggcgcggaagatcggtttgaccggaatcttggttccgaacagtttggtatccgcttcccgcaggtaaccatccacccggtagtattcggcacgcatgccggccgatacgctcaggcggtcgaagaaacgctggtcgtactgggcgaacagggcggcattgtcgctgtcgtgcgtcccggtggttttcgaaacgcttttcatgtgttcgtaggttgccccggcggtgatctgacttccgttgtcccatttcttattgaactggtagtctacatagtaggtgtagttcttgtccgtccctttgggaacattctccttgttgttgttcatcacccaggagatcaggtcgcagtaatcggctgtcgtggcagtcgggaataccccgttcaggatgttgacggccccgtccacgatcccgttcaggtcgccttgcagtatcggctggatcagcgggaagaacgggctgtagtctccgttcttgatgttgtcgatataggcggtgaccgtggcggcatcgcttcccatatcgcctaagatgtcgtcgagcgacttgcggctggaacttccgtcgatgatattgtctccccggtaatagaaacgggttttgatcttatgcgaggtgttgttgttcggattggtaaagttgaagaacggatcgatatagaaggtgttccctttgcgccccatattggcgatggacgacggctggtagacttccaccggcgaacgccaaatgaagaagtcggcatatttgtcggccaggtagttgaagttgaacccgtagttcagcagtttgccctctttcatcggatggtggtatgtcatattgcctccgagtcgcagacgccggttgtatccttgatcgcggtatccgtcatcggaaaataggttgagtccgcccgatacatcgaagtttccgatccgtcgtgcgtgcgagacgtctgccccttcatattcgttatgaaccggatggtcgtatactccgacataggcgcgggcacttgtggtcggcgtgagtcccggccgtttcgtgcggatgttgatcaccccgttcaaggccgatgagccgtagagcacagaggaagcacccttcatcacctctacctgttcgatattttcgagcgggacgatgttccagttgatcactccgttgcccgaacttagagcgctcataccgtctaccaacacaaggctgcgtgaaccgaccccgtatgtccatccgttcccaccccgtatggagggttgcttgtcgttgatatccacacccggcattgtgttcagtgtcgaactcaggtcggtaggggcctgcttggcgatatcgcctgctttcagcaggtccatcgaaacggtgacatcgcttagtttctgttcgaagcgtccggcactgaccactacgtctcccaacaggttcgttttgatgttcatatagacatcttttgttttggtatcccccttgcggagtatcagcgggagttgttcgttctcgtacccgatgtaactgaacaggaggtcgatcccaccgtccggcaacgcgatttcataggctccgtcggcatccgatatggttccgttcgtatccccgtttattttcttgtaggtgatgttgacgcccggtagcggttcgtgggtttccgcatcataaacgtgccctttcaccatttgtccgaatgcggtcccggtgaaaagtgacagggcgaaaatcaagatatatagctttctcatataaaatgcttttaattgatgtttttgtctttgtacaaatagataccgatctcaatggggattgtgctcagctcttggctcaactggtccaagatcgcaccgaacgtctttcctttcaggagtatggctgcgatacttacgaactggggtgggatcaggttgccgatcagatccatgacaggtgcgttaagcgtctcttccggaataaaaactttcacgatctccagcaaggcgaacaattcctgtatttccgatttgtcgaggagcaggatgagatcaccttttgccgggtcttcgctttcgcgaattgtcattttaataccggttgtagaccaagtattgatcttctggtaggctgccagcagcgcattttccatagagctatccccagagttggctttcgtctgtctgtttatcatcacttggcggatgatcatgtcgatctgcgggattacatataaggatgtattgtcgttcacataataagtcgccaggttgggaggtgaagcgttccagtcgtttgccggatgtttgatgtagttgcctatcagacttcctatccggaccgagtcgggcaggggagcatagcgggcgatgatgtttccgtccgcctggaaggccagaccgtcgagcacagaactgatcaggttgcagaccagtttgccgcccaccaggttatacagcattccgatcatcgtctgcatgctgccattgtctacattgtaataagaggcattttcgtgggcgacataccaggtaccgttcattgtcagctggttctctggaatcgtgatgtccgacagttccagtatcaattttccggtctgtatactacccagataatgaaatgccgtaccggttgaggttgtcgcgcctccactgaaagaatagctgccggaacctgctgtcagagagacgccggagatagccgtttctttatcgtgcggtagtacatatttaagaatgatgtgtgcggttttcccgtcatccgtcttaaattccacatcttttccgataaatgtattcccgttatagctcaaaataagggaatctccgtttgcaggggcacttagtttgttagaataggtcccgcttagttccgccggggaaaggccatcataatcatccttgtcattgcaggatatcaagagaatagccagcatcatggcgcaaagtaaactgcatattgattttctgtccatatgtttcgcttttagtcatattataggatgatacaaagaacaggcttaagtttgaaacaaacaatctccatgtttgggaataaatattctatttttaagattgttaggtgagctaagcatattttgctacttttgaaacaacaaaacgatgtttttatgaagattgacgttgacttgcctaaattcgatattccgaaagattttatcgtaggcgatggtattacgggtgacatcctgaacatgtacgggctttttccctgcaagataaaagcgggcgtgtttgctttttgcacgcgggggacgatccgtgtgacgataaacctggatgaacatacggcacgggcgaacgatttcatcactttgctgcccaatacctttatccagattcatgaagtgtcggaagatgcggaagtctgtttcgtcgctttttcttcccgttttctggaaagcatcaattttatccggacgatctccaacttgattgttacgatcatcgagaatccggtagtccctttgtccggtaatgccgccgctatctataaagattttttctccttgctggtacgggctgacaacgctccggactctatcctctttaccgacagtttgaaaccggtccttgacctgctgatccaaggggtggtcaatatgtacaggaggttcaatacctggaaagaaccggtcctgagccgtgataaggagatcgctcgcgagttcgtgcagcttgtctggcaatattatacgaaagagcggagtgcctctttctatgcaggaaagttgcggatcaccttgcctcatttctgctacgtgatcaaaaagacgaccgggatgacagccctcgatattattgccaacgtcgtgataatggatgccaaagcccaactgaaatcaacgaatctcccgataaaggaaatctctatcggactgggctacagcaacgtcgctttcttcgacaagtatttccgtcgctacgtggggatgtcaccgctggagtatcgcaacagctaagccaaccatcttatctcaatttgttccggttgaaatgaggacctgctttcaataaaaagaacagtgtcgaaaaaattgtcaggcacgccccgaacaggtaagcgtagttgaatcccccgaaagcctgtgcgatgcttccgcctatcatcagcccgatcccgatccccacatcccaactggtgagataggtggaagtcgctgtccccctctggctgttgggagcaaggttcacgaacagagtgttgaaagccgggaacatcgtaccgaatgcgactccttgtgaaagggcgatcccgatatacagataagaagtgaaagccgaattccactgcatcagcctttccagagctgccagcccgaagaagctggcggcggcaagatacatccccaacgagatgaccagcgtgattctccctttgtcgacctgccgcccggagaacatacgcgagacagccaggccgatcgccataaaggtgaaatataatcctgaattgacggaaatcccgatctcatcggcatacatggccacatatgtggttgtcatgccgtagggtatggagagcagcagtaaggagatgccagcccaagtgcctttcaccaaaaagaaacggtccagcgagatcggttctttctttatcggctgtttccgcggtgtctttaccaaataggccatgatgaagccgaggaggcaggaaaggagagagcaggcgaaaatcgtttcgtaggagaagctggtgtgcatgaacagccctgtcatcggtccgaaactcatggccgtattgtttgccagcccgtaataaccgatcccctcgccacggcgggaggagggcaggatgtcgatcacgatcgtattgcccgacaccgtcaccatgccgaaggcgaagccgtgcaggatacggagcacgatgaagatgctcagcaggctggcgatcatatatccggcgaagatgaccatgaagacggagtaggctaaaaggtacaacggccgtctggcgaatgtgtccagcaggtatccggagaacggacgaatacagagggcagcaatagtatagcacgaaaggataaaaccgatcatcgatttatccgcatcgaactggtcctgcaagtaaaacggcaggatcggcaatatcagataaaatgcgaagaacagcaaaaagttggctgctaagatatagcagaagctgggtgatataagtttgtcttttgccattgtttcattttgtttgtgttattgttggattccgaaccccaatcttcggagctgtccggtttcttccggggtcgcatggacgattgtgtatgcaccgtattctcttgggtgatgatagtttgtccggaaccactcgaatctgtcgggattttcccgtagcgcccggtctatggcaagcgggttaaaactggtgaggatcgcttgttcgatccggtttctgtcaaaccgatttaagtcgataaccggagtttcgggagctggcggaatcacttcgctgatcttctcgatcttcacttggaagaatttttcgatgtttttcagacacatacgcgtaccattggctttcccgtctgccgagaaaccggcaatatgcggggtggctatcgtggccagttccaataattcccggtttatatccggttcgttttcccaacagtccaagatcagttcactgatcttaccctctttccgggcatgcaatagggcatccgtatcatggacggctcctctggatgcgttgacgaaccaaggtttccgttggagcttgcggaagaagtcttctcctgccaggtggcgggtggcaaaacggccttcttttgtcagcggcgtgtggaaggtgacgatgtcggcttgctctgcgatcgtctccagtgagacgaaaccgtctttcccctccttctccgcacgtggcgggtcgttgcggagcacgttcatcccgtaggccgagcataacttctccacctcttttccgacatgaccgacaccgacgatcccgatcgtcttcccctgtaggggttcacccttgcgaagcgcgatcgtgaccaatccggaaagcacatattgggcgaccgagacggcattgcatcccggtgagttcttccaggtgatacctgccttatcacaataccgggtgtcgatatggtcgaaacctattgtagcgctggtaatcagtttcacccggcttccttcgagcagttcgcgggtacatttatcgatactccgtacgatcagtatgtctgcatcttgtacgttttctggtgtaaactctttagaagtgagatactttacctctgcgatcggttctgcgattcctttcagaaaaggaacggtattgtcggcgactattttcatcttgctgtcctttttcgagaagacaaaggtagggattattttccaatcttgacataattcaaccgcgtgtactgtatgccataactttcaaccgtcgcggcgatacatgccgaagagatgtgtagcacttcacccggccggtaggcatgttccagggagggcaactgtccggatgcatggctgggattgccggatgcaaaggtcaggttgaccaggttgccgctcgcatcgatggccgtcaggcgctggcgtacgaagaagaccggagtcgtcccgatgacgcaggtcctgtatgggtcgtcttctacccgtactttggttattttcagggtgagattggacagcttgtcccctttctttcctaagaaacggctggtgggacgtggctggtatttcttttttagcatcttgtccaggtagacgcagttgtaggcttgtgccattttgacgaaacgttcttgcttggggatgataggggtatatttaaaggcgatccagttcacgtagcccggatctatccgcaagatttcatacaggaagtgtccgcggtatttgccgaaagcgatcaggtcatctccgtgtgtcgacatcctcttttcattgtagtccgtgaccaggatctgtcggttggcataccacaattcggaagtgacgatgcgcagcgactggataatgtccggtttcaaatcttcgataaacaagatgcaccgcctgtcaagtagaggcgtgtagaaccacaggctgtagtccggatgtccttccctcggtaaaaccacaaggtaacatcccgcctccttataagaggctttcccttggttgtaaacattcaacttctcataaaggagttcctgttccgcctctgtgatattgggtaatctggggtttgccatattgttacctcctttttatgttttgacacattgcccgttttgcgtttaccgtgcactatggacagattcaactgttttagcactgtctttgttccaaaatcatgtgctgaagtcaatctttattcatgccgttcatgctgacaatatgagttgtgaacgaagatcgagaaaaatattgataatatccatgtatttctaactttaattgttcattttcttagattcaaaccacctatttggtttcaccgccttttgaaatattttgattatcaaattgtatgggtgggtgaaggtgaacatcgggactaccttcaacttaaaaatttgctttcacccttgttttgtcccgatctcggttgactatgttcccctcccgtctcttatccaaagcgatttatttaagtgcaaaataaagcgattatgggagtgcataatatgcatatattatagatattaaaactcatcttatattcttttttattatcgaccagggtcgaaagcctttttgcccattgtcgaaaacctttttgcccaaggtcgaaaaggctttcgacaatgggcaaaagctctatggttttatagcttggcgatagaaacatggcagttgtcggtttataacactctttccgtactcagcttatttttttgatgaaggcaactgtgaccggtgaaggcacttttactctttgcatttaccctttaatggtcttgtaattaaattattatgcacgtaggtgaagatgaatccttctatcgtccggtaaacatctcggataacgattggcgggatatcgtctatttccagcaggcggatggcgttatgctggtagagggaaccgctttggcagttataaaatattcagaacttgtaccgcaccgaggccataaattcccgcggacggatattgatccaggaagtatagctttcggtgacggaatactgcgtgtagctatactgtttcttgttgaacaggttggtcgcttcggctgtgaactgccagcttcccattttccaacgtaggaagaggccggcgaagaaagcgttgacagacttgtcccggctgacatcgttgtggtagtggtctgccgaaagattgatctctacagggaaaagctcgtaggagagctggaacttctggacgacgttcaggagcggatcgaggcgtgtgccggttccgatcttcgaccgtccgaggtagatggtcgcttgatagctggcagagaagctgcacaggggcgaccagatcagcttcggttcatattgcatgaaatcgtaccggtaaggcaaccgttcgccggcgctcagttgttccgcgttgttgcgtcctaagaggtaagagagcgacgtcttcagtccccagtcgtagaagcctttggaaagggttcctttcaccgtccagccggaagaatagttggacaggcggtgggagacaagcgagacttgcccgtcgcggacctgctgttcgaagatacggtcggaccatccccggttatggttgagcgacagggtggaaaagaactcgcgcaccgtgctcttgtactctccgtacaacgaatagctctggttgcggtagacgggcaggataccgttgttcatccgatagttgcggtagtctgtgcggtatgcagccgggtagaggtcggtgatgcttccgtaactttccttgtagttggcatggaaagaaaaacgccaggcatagttgaacttatagttgatgtacaggaacggattggcagccaaccgggaaaagccggctgctggaaaggtggtccatacgaacggaagatggaaggtcagattccatttgtgcaggttccattggtagttcggtttgaaatacagactcgttccgttccggatcgaattgatatcgcctgttataccggttgtatattgccgggtcaggttccctttcttgcgcaggaaagcgaatgaatggtccagatagaactgttgcaagtgtaacgtctgttcgtccccgtctatcaggatgtgggcaggctggttgtgatagcggagcagtgaacggagttcgagcgtgtatttatcccgtggccagatgttttgcaggtaattgcgtatgcccatgtccggtgtccggatgtgctgattgaccgatgagacaccggagatacgggacgtgcttctttcccagttgccggaaaggttgaagtcgtttgtcaggtaacggctgtcggcgttgttttccaggcttgccgccacttccgcccggtcggtacggatgtgcgtgtcgttttgttcctttagggtaaccgtatctcctgcctggtaataatgggtgatacttcccctttcttgttgtatgagatcgtgcaagtagttgatgttgaagcgtaactgtgtcgcttcgtttagcttgtatatccggttgccggaaaaggaatgtacgttgttaaagagcagccgttcctttttcagtggagcggagaaggagggctgggaaaggaatgacgggatcgaagggcctattcttcttttggctcctgtttgtgtaagtacgttctgttcgtctgttacattgtttccccggttgttccctttataaatataggcggactggcttttacggctgatctggatggcattgcccatgccttcccacaaaagggggggaatgcccatgcttccttccaacgtccccatccagcggtctcggaaattgtctttcagtttgaggttgatcgcgatatcttcggttgtcagcttcttttgcagggcacggatgggttgatggttttccagtatttgcacgctcttgacagcacccgcctgcaagttattggttagttggttgtaccgcccgtctgtcaggtccatgccttccacatagaacttgctgatctttttcccgttgtacgagattttcccgtcgtcgtctacatccactcccggcagttttttcagtacgtctttgatcgcttcatctttcggactgatgaattgcgacacgtcgtaattgatcgtgtcgtgttgcccgtagacgcgccccggacgtatctcgacctctttcagagtgaagatttccggttcgaggcggatgagaagtcttgtcccggctgtgatcttttgccggatcgctttatatcccaacagtgagacgtggacaaacagtgagtcgtctgcttggtggagcgggaggatgaaggtgccgtcggcctttgtcaaggtgtaggtcagcgggagctgccgtccggttttacgtatctgcacggttgcggcatctaccggctggccgtttccggcatcggtcacggtccctttgatgacttgctgggcagacaggttgcaggcggtgatcaggagaatggatatatacaggaggctcttcattgtttgttcttgtttttgttactctttttctatcggattgtaaggcgtgttcttcgggtgcatcggttgtccgtcttctcctttgacgatgatctgcataccgggggaggtttctttcagatagccgatcgggtcggcggcgaaacgttcgtgtatccggaggagatctttgcgggagatcggttcgtattcgcttccgataaacaggatggcttcttctttgccggctttctcgataccggtgcagacgaaggtgtagtgctgccggctgtcggaggctttcaggatcaggccgggcagtccttgcagtttccaaggaccttcgctgcgcggaatttccggagtgtaccaagcttcgtagtttcgcccccggaatcggcaggtcgctctgtagcaggtgtaggcgaggaaagttgctgtgtcgggatgcagttcccagacaggaatctctgttttttcttccgaacggaagttactggcggcgataggttcgagttgtgtcagtttgccttcgggatagtttttgaatatctggtagttcacttggctggtgccttgtttcatatgttcctggatgatttcctgcgaagctccggtcgctttgtccatttcgataagcgagtccatacggaaacgggcatagctgtagaacagggaacttttggaacctaccttcagcatcatagtctcatcgatgtgtttgtcttcatgggctgtgtcgccgacaaaggagaggtcgtactgggcggtgaacaataccttgtcgatgggtttcgccttgagcacttcgctcatgttgtacacgcggatattgaattgggcctgtacagccccgcatgccagtaaaagaactgcggataataggattcgtttcataactttaatcgtcttagagtgtttgtctgctgcaaatgtagcggacggcaaacctccggggcgagtaaagttattactgaaatattacggtggggttattcctggctatccaaatccttttctatatcttttataataagtaagacggtgctttttagaggtgggagatgtttcttaattgtaatgaatatcttttcctcatcaacagcagagtattcgtgcgaaatgatattacgctgtcctatcaccttaacccaaggtacttggggatatttaggtagtaactgtttatttgttttatcgtctattttcttgacgtattcaccgattgtctgtaagcgcatgacacaggaatcaaatatggtcattctccaaggtgtggaaaggaagtcgtccggtgtttgtattttatacatcggtcgagaattacatcaatagcctcggctataagatacaatctgtctgtaatttcatctttatgcataaataccctcctttagtatcttatccagtaacagaggccttaaacttttacgcaagcgaatcaggtcgatcgggcagccacaccgtttttccaaatcacttttctctgtttgttctccacgaacaactgatccgaagatgccgattttgaggataccgtatttatcggcaaatttggatttgaattgttttagcaaagtaatataatatctgtaatctttcatgaagaatcctgtatatgggatcaaagatacataaaaaacggtgattcctatgtaaatagtagttttttccgtaagtttgtgcaaacttctttcaagtaaggggttaagtagtcaaaaagcacaagataataaagcaaactttcataaatgaagactttggataaacagaaaaagaacgtccttaccctttgcggggcggcgatggcatcgttgcttctttggggatgtggcggaacaaaccctacggccgaatctttcgaacggtctgattattatacgcgtggtatcggacagtatccgggcgacccgaaggaggatttctcgccttctctggctccggatccggatccttccacttaccgtaacattgcccggttgcgatcggcttttgcctcttccagtcatgactataacttagtggcacagttggcgacggacggcatcgtgacggacaaacagccgcagtacctgaacctctcgactcccgatggagacgttccgagacgcgaacgcgaatggatgatcgacgaagggccgtattcacggaatacttttcccggcgaagatacctatttccggtttacgctggcaaactatagcaaagcggccggcaaactgtcgctggtaggaacggtcgtgtatgacgataaagtgtcgaaaggcggctacgagatcatctgccagggttccaatgacggaaagaactggacggaaatcggcaaactgagcggtagcggtctgcccggtcaggcagtctccggacgggtggtggtgaccgacccgaacaaacagacgggcgaaacaaccatgccggtccgcaaactgaatgaaacgattactttcaattccgaaaacgcctactccgattaccgcgtgctgctgaagatggcaggcgcacacgattgggtgtttacggaagctaatttcatggataaggacggtggtttagtggaaatgaaaccgtcccagttcttcaacagtgcctggatgagtgctactgggggtgaagaatggttgtatgtggatctcggcagcatgtcggagttcgataaggtcgtgttgcactggatcaacaaagccgtcaaaggaaaagtgcaggtgtcggatgatgccaagctgtggaaagacgcagccgaactgccgggcggtgacggcctgatagatgaaatcgcattgaacggcaaacagaatgcccgctatgtgcgtgtcctgatgcaacagccggcgaacgatagccgttatatcctgagcgaagtggaagtaatgggtaaaggcggattagtggctcagcctgtggctcctcctcctgcttcgaagggaaagatcatcttgtccggcggcaactgggagctgcaacgtgcttctgaagtgactgcttcgggtgaagaaatatctactctgggctacaagccagagaactggatcgtggcgacagtgccgggaacggtattgagcagttataagaacatcggggcaatcgccgatccgaactatgcggacaaccagttgcaggtgtccgaatcgttcttctggtcgaacttctggtatcgtgacgagttcgaagtgccggaaggattcaagcaggaccgcctgttcctgaacttcgacgggatcaactggaaagcgaatgtctttctgaacggaaagaaactgggccgtatcgaaggcgcctttatgcgaggcaagttcgatgtgacggatctggttgttccgggtaagaacgtggtggctgtagagatcatccggaataaccatatcggggcgatcaaggaaaagaacaagcagagcacggacttcaacggcggaatcttaggggctgataacccgaccttccacgcgacgatcggttgggactggattccgacggttcgcggccgcaatatcggtatctggaacgatgtcttcctgacctcaaccggaaaggtgacggttgccgatccgcttgttacgtctgtcctgccgttgcccgatacgacttccgctacgttgacagccgaggtgatcgtgaagaaccacgatgccaatacggtaaacggtacgttggaaggcaaggtaggagatatcacattccagcaacctgtttccctggcggcgggagaagagaagacagtcgttttcgatgtcaaggacttcccgcaactgaagatggaaaacccgcgcttgtggtggcctaaaggttacggcgcgccgaacctctacgatgccaacttcaccttcaaagtggatgataaggtttcggatgcgaaagacttcaaagtcggtatccgccagatgacattcaatgaggacaatcatattctgagcctctttatcaatggccgtcgctttatcggccggggcggtaactggggcttcggtgaatcgaatttgaactatcgcggtcgcgaatatgatattgctgtggcttaccatgccgatatgaactttacgatgatgcgtaactgggtcggcatgatcggcgacgaggagctttatgaggcttgcgaccgccacggtatcatgatctggcaggacttctggctggctaacccggccgacggacccgatccgtattatccggaaatgtttatcgccaatgcggaagattatgtgaaacggattcgcagccatgcgtctatcggcctttactgcggacgtaacgaaggttttccgcccgaacagatcgacaaggcgttgcgccgtatcatcaaggaagaccatccggatatccattatatttccagctcggccgatgatgtggtgagcggccacggcccgtaccgtatgcttccggcaaaagaatatttcacgctgaagaccggcaacgataagttccatagcgaacgaggcatgccgaacgtcatgacctacgaaagcatgctccgcaccttctcgccggaaggaatctggccgcaggataacgaatgggggatgcatgactatacccgcgaaggggcacagggctgcacctctttcaacgagatcatcgcgaaaggatatggcgaaccgcagagtgcgaaagagtttgccgaactggcccagtgggtgaactacgacggccaccgcagcctgttcgagtccagaagccagaaccgcaaaggtctgctgatgtggatgagccattcctgttggccttcaatggtatggcagacgtatgattattatttcgagccgactgccgcctattttgctatcaagaaggcttccgagccgctgcatatccagtggaatccggcaacggacgaggtagaagtggtcaactacagcgctggcacgcataaaggtctgacggcaaaagtacaggttctgaatatggatgcatccgtagcctgggaaaaagaagcgactgtcgatagcaatgaagatacgaccgataagtgcatcaagttggaattcccggagaacttgtcgaaggtccatttcatcaagatgacgctgaccgaagatggcaaagtcgtttccgacaacttctatcacagaagtttggaagaaaacaactaccaggatttgtgccagttggcaaaggttgctttgcagtccgcaacaaccgtggataaaaatgcagacggaacctggagtgccgtgtctgttatcgagaacaagacgtctacaccggctttgatgatccgcctcaatgttgtaggtggtaaagacgaccagcagattctaccggtattttattccgacaactatttctctttgcttccgggtgaaaagaaggaagtacgtatgagctggagagatgaagataccagaggtaatgaaggcaaggtcttaattaccggatataacgtggaataatattataggtcggcgacggaaggcgtgcaaagtacctttattacgatcctttaggcacagatttacacggataaatttattttctttccgtgtatctgtgcctaaattatgcctattagtaagcagaattttgtttcgacacacctcctgtcatatttttttcttgattattactaaaatattacgcagcctgaaaaagatctatttttgtataggacttatcgggaagctctttacctttgccggaaagagtatcggaagtagatgggaaagcggatcaaactgatttatatattatcgttattctcagctttaatggcgataagcgtgcaggcctattggctctataatcagtatcgttatgaagtggagcgatatgctgatgaaattgccgccgatgtattgcgtgtcggagatgaagagtttgccgagcgccggaaaatggcgataggtgatgatacttcttatataatagatcgtagttcgcgtactcaatccggaacttccactatcaggaatgtgcagacacaactttgttttgattttaaaacggatgtcttggtcgattcgataattggcggtcaactgaatatgacaaaactaaacctctcgtttgatgcgaccttaccggaagacagcattattcatggtgtggaacgaaatgtcgttaattactatattcctttccaggttgaacgtttagatagtctgcttcgggcgcgcttgtcgcaatacgatttccagatcgcttttttgccggaaggagatacattgagccgtttcaattcttggaaaattttaccggaacatctgttcccgccttgcttgggagttaaataccggtatgctccgttggagcggaaaggggtgatgatagaagtcggtttcccgataaaccctcttctgaagcggatggtgggacaactgattttgagtctgtttctgatcctgttgctgctttcctgcttgggtttgcaaattaatacgatacttaaacagtataagcttggcgaaatgcgtgaaagttttgttcatacgatgattcatgaattgagacgtccggtacagactttgaaaatgtgtgtctctttcttgaatgataaagagatgcgcacggatgaggctgcctgcgacggtattgtccaggacgccttgtttgagctggacaatctttccgcttatctggagaaactgaaaaatatggtgagtgccgacggtagtgcgacactgctgcatcccattctgttcaatttgcaagagttggttgaaaaggtgatccgtttagttcatattccatctggaaaacaggttgctttttctactgcttttccacctgatctcccattggttacagctgatcctgtgcatattgccaatattctgagtaacctgatagagaatgcgattaaatattccggctctggagtcaatatccgcgtagtcgttatccggaatgacaagctgatagaactgaccgtaactgatgatggcgttggtatttctgccgacgaacagacgaaagtcttcgagaaattctatcgctccgtccatttaccggataagcaaattcctggattgggactgggattgagttatgtacgtcagatagccgaagcccatcatgggcaggtctcgcttcgtagtgaagtgggaaagggcacggaagtaacagtaggattaccgatataaaacgatatggcgacaccattaaaaatactttttgcagatgatgatctgaaatattcacttcttctcaaacgttttcttgaaaaagaagggtatgatgtggcttataccggaaacgggatgatggttctcgaacaatttccggttgttaagcctgatcttgtccttttggatatcaatatgccgggtttgaatggttttgaggtcgcagaaaagatacgggaaaacgatcgccatgtcctgatctttttcctttccgaccgttcggacaaaaacgaccgcctgaaaggcttcagcctcaaaggaaatgactatcttgccaagcctttctatccggaagagctgctggcgcggatcaaagagcggtttgaagtgaatcccgatgtgaaagtcgaagaagaaatctatcatttcgctaataccgtgtttgactattccacaaatgaaatccgtacaggcaacagcaagacgttggtcacttcccgtcaggcagaaattcttcgtatcctcgcccgtaatccaaatgttgcgatcgaccgtgaaatcatcctatctgctgtatggggaaatgtctcttatgccaactccctggctttgaatgtgcaggtcacttatcttcgcaaagccttgcgtaacgaccctttgaccagtatcgtttcccttacaaaaaaaggctatatgctgaaaggataaaaaaacttgctatctttgcgcaattgagaagtatagacaaataaaaaagcgtatgagtttcagcgaaaagtcttgcctggtatttgaacaggctacgaaggcatatcatatcaccgatcatatagatgccacggtacataatccttatgaggtgaagagtatagagttctatctgtatttgaagaattggattgatgctgtgcaatggcatatggaagatattatccgcaatccggctattgagccgactgaaggattggtgatcaaacgacggattgacaaatccaatcaagatcgtacggatctggttgagttaattgacagtttctttttggatcagtataaaaatgtgaaagtcttaccgaatgcaacgatcaatacagagagcccagcatgggcgattgatcgattgtccatcttgatcctgaagatttatcatatgcaacaggaggtagatcgttcggatgcgactcctgagcataagggaaaatgtgaagaaaaattgcgtatacttttggaacaaaaaaaggatttatgcgtggcattggatcagttattggcagatatcggtgctggacgtaaatatatgaaagtctataaacaaatgaagatgtataatgatccggccttgaacccagtattgtacggtaaaaaataatggcaaaggtattagtaatacgactctcggctataggcgatgtcgctatgacagtgcctgtcatttattctgccgccaaagctaatccggaagattcctttactgttttgactcaagcttttttgatgcccctgtttatgaatcgtccacctaatgtggaggttatcggtattaatacaaagggggctgaaaaagggcttatcgggttgttgaaatttatctcggcattgttgaaattcgattttgatgttatcttggatttgcataatgtgatccgtacgataataatctgtacttttttcagattgaatggtaagcgtgtgtttgtgttggataaagcgcggaaagaacgtaaaagattgactgcaattaaaggcaaacgactttatcctcttcgtccggttatagtccgttatgccgatgtgtttcgggctgctgggttgaactatacagaaacgtttacatctctttatgaagaatttcctgccgaattgtctggaatggcctccgttgctggaattaaaaaaggcaaatggatcggtgttgctccatttgccaaacaccgaggtaaaatttatccagtggacgaaatggaacaagtcgttgcctgtttgtcgaaatgtgaagattatactgtttttttgttcggagggcgaggatatgaggaggcaatccttgaacaatgggagtttcaatatccacgtgttaaaagtgttgtaggtaaatatgccttggataatgagttggcgttaatcagccaattggatgtgctattgtgtatggattctgcaaatatgcattttgcctctttggtaggtacacgagtgatttcgatttggggagcgacgcatccttatgccggtttttatggttatcatcaagattccggtgatgttattcaggaaaatttaccttgtcggccttgttctgtatttgggcagaaaccatgtttgcgcggtgattgggcgtgtatgacactgataacaccggagaggattgttgaaaaggtaaaggcatcaataaaatagtaaagagaaaactacgatatcatgagggtctgttatttttcaaaatgttataaagaactatatagtgcgggaagtaaagcaaaaaccgatatggaacagattatgtgcgatttaggatatcggaatatcgggtttccttgtctcgtttgttcgaataagatacttggctttgtcataactttgctcagtatgattaaagtttgttttaagttaaggtcaggtgatattttgattatacaatatcctttgaaaaaatattatacgttattatgtaatatagtgcattatcgaggagctaaagttataaccttgattcacgatttaggctctttccgacggaaaagattgacagtccttcaagaaattgatcgtctgcagaattctgattatttaataacattgaatgattcgatgtctgcttggttacaaactaaggggtgtgaagtcccgaaaggagaactgaagatttgggattatttatctccagccattgtcttaaacaaaatagaaccagctactgactatacggttgtttatgcaggcgcgttgggatataataaaaatcgttttttatatgagttggatcgtttacctcgtcaatggcatctgagtgtgtatggtaaaggattagaagctgataagattctcaataaagaatatttctcatataacggctttttgccggcagatcaattgatatcttcggtacagggtgattttggcctggtttgggatggagattcttatgaagcatgtactggcaactatggtgaatatttacgatataataatcctcataaagtctctttgtatgtccgttgtcatcttccgcttatcatttgggagaaggctgcattggctcctttcataaaagagaaggaaataggtatttgcataaattctttggaagaactggatggtaaattggagaaattgacggtggatgattattttaagatgaaatctcgggtgattgagataagtaacttgttgtctgtaggatatttttttactaaagccttggatgaggctgttaagtttctgacaaaatcggatgtggcagatgaaggtcgtaattaatcctaaatacaattttctcactgattttatttatcatcttcctggatgttttttcaaggacggtgagactatataccaaggacgtaatatccttaaaaagtacgatatacaaggatatcgtttgatagtcaagaggtttaaacgtcctaatataataaaccagattgtatattctttttttcgtagatcgaaagcacgacgctcttttgactattcgcttgaagttcagaagcgtggatttggagttgcagatcctattgcatatattgagataaagcacggaggtttacttaccgatagttattatatatccttatatatggaaaggatggaagaacttcgcgagtatatggctgtgtatagagcagaagatcgagagctcagactggcttttgcacgttttacggcacaattgcataaggcggaaatattgcatgtcgattattcccctggcaatatcctggtaaagaaacaggctggttcgtatgtgtttgcgttagtggatgtcaatcggatgaaatttaaaagtatttcagttgttgatgcttgtaagaatttagctcgtttggcaacatcccgtaaagttttggatgaagtggcgtgtgaatatgcctctcagcggggatgggatagtttggaaataatgcgcttgatgggagaatatagtgatcgttttttcaagaattacgcatttcgtcttggcaataaagcgtggcgaagaaatgggggaagttgttttgcccttccttcttttttctataaagcatatgatctgttaagttgttgtaagttacttccagaaacgacacgcaatgtttaccatcataaacggatttgggtttatgatgattatttgcgtccgtttgattttcggaaagtgtttcctgaaagtcttcaagactgagttttagtatctaattttgatttggaactccattccgtgatatgtgtacaatggctaatgtagtattgttcttcttcggacagattcgaagagtcgttataccaaggcaaatgttctgcttggtagggatatgctgttcggtaagcttcgactgaacggcttctgctcaatccgacacgagggcgataaagggcgaaggttgtatctattggtgctctgtacagacctccttcggcaggtttgagataatattgtttttctaaattgataacttcttctttgtgtatataggaatcggggatattatctattcgtagggaaaaaccgatcttgcgggcgaatggatgtttttttaattctttaaaaaaatagtcgatgaagtctttagggcaataatcggaagggattacatccgaatctgtatagatataatagtcattgcagaatcttttttttaaaggcgatttccaaagtgctttaaagcctaagttttgattgagatggaatactgtaaatgggcaggttttgtaatattccagcaaaggtggataagtcgatgcattatccagaatgtaaatattggtatatccacaggcagtcaatgtttctgttaacagccgtaaggttgtgagacgattaaaattattgatgataataggaatctctttggcatctctaattagagatggacttattatttctcgaaggaaataatagtaagagccgatattgcatgttaatgttttgaatatactcatataattttgatgaacaggttgttaatattattgtaaaggaataaaatccatccagaattttttcatcttacgtttataccaagaatggcaaccgaaaggtaattgccggttgtttaatttgtagcaataacctggatatttgtcaaatgaaaagcgaatcgcttcttttactttgggatatgtgaatccgtttgcttccgttgcccaaaaaacatcttcattgtaaagatgatatcgcttttgcgccagatagtgatcgattcgttcgttttgttcgcaagttatccgataatgactggctacttttctcagagataggccaccgttgccgattttgccatatagatcttgcttggagggtttccctctgaatttatggtaagaatgtatcaaatgcatgattccggaaatgacgggtagtttatagactggacgttgcaaccaaggtgcgccaatatagtcgtatcccttattacaccattctctcaattcgtcgcgaaaaacataagcgtccaactgatagatcaaaatataggtacaatctaaaaaactttcataaaattctttagccagcatgagccggttataaccactgatccctttgaaataagaatctgcgaatgaaataaatgacaacttaggaaattcggtcactagttctgacaagtctaaatggttgggtttgattacgactaatggatacattcgtaatattttgtatgcttgtgataaagattttctttcttgttgggacagagaggcttggtaaataggtataacaactttcactagattcatatgagcctttttgtttatgtttaatatatatatatagtatatacacaaagatatgaataatttacaaaattgaatgggggaaatgtttttattataatttattatatatctgctatatgatagtcgtgaaaaatattgtaattttgtaatatacattcaatgcattgatgtatagtttcttatggatgatttggattctttatgtacgatgtgttgatgattttgtattgattatttttgaaaaagagtttatgattccaaagattattcatttatgttggttcagtgaagaatcttttcctgttgaaataaaaatttgtttggcaagttggaaacgtatattgccggattatacgataaggttatggacatatgcagatgcattggcaataggttgtgattatgtctcggaggctctgtctgttaaaaaatgggcttttgcagcagatgttatccgtttttatgcaatctataaagaaggcggaatttacatggacagtgatatgcttcttaaaaaacgttttgatgaatttatcccggagcatggttttgcaactttcaacgaatgttggggaacagtccttttacaagctgcttttttgataggtgagcagggtaattctttttgcgaagaagtctttagttattataagcagcgtcattttttattgcccgatggttctttcgacatgttgatctctcccaaaataatggtgatggttgctgaaaaaagaggatataaaagggaagatattgaacaacatttaggagaagatgtcgttatttatccaggatgttatgtttctccctgtaagaaaattcagtatcccgaggcttttgcttgtcatcaagtgtatgggagctggcggaaacatcgttttggcagaaaagtggaacgttttctgaaacatgcgtacctcgtgattcgttttgcgttatttaaacgataagtatagaagattgaataattaatggaaaatataaaacttgccgttatcggcctcggatatgtcggtttgccgttggcacggttgtttgcgacgcgttatcctgtggtcgggtatgatgtgaagcgggagcgggtagcagccttgatggaagggcgggacgcgacgcaggaagtatcggatgaattgttgaggtccgtgctactgccccggttgccggaggaaggtgaggcgggattgttttgtacgtccgatgcggaacagctccacggatgtaattattacattgtggcggtccctacgccggtcgacttgcatcatagccctgacctgacacctctttattcggccagtgaaacggtagggaaggtcttgggcagaggcgatatcgtgatctatgaatcgacagtctgtcctggtataacggaagacgaatgtgttcccattctggagagaacgtccggattggtttttaaccgcgatttctttgccggatattcgccggagcgtattaatccgggagacaaggaacatacggtggagaagattatgaaagtgacatccggttccactcccgaagccgcagagaaggtcgatgccctataccgatcggttatccaggctggaacctttccggtatccagtatcaaagtggcggaggcagccaaagtgatcgaaaactcccagcgtgatatcaatatcgcttttatgaacgaactgtcgaagattttccatctgatcggtatcgatacgaacgaagtgctggcggcagctgggacgaaatggaacttcctgcctttcaagcccggtctggtcggagggcattgcataggggttgatccttactacttgatccgtaaagcagaggattacggtttccatccgggactgatcctgtacggacgtcgtatcaacgatacgatgggcgaatatattgccggtcgcgtcgtgaagtgcatgatcaaaaaagatgttccggtgcggaatgcggaagcactggttttaggctttaccttcaaggaaaactgtcccgatgtgcgtaactccaaagtcggtgatgtcgttcgttatctcggtgactacggtatcaacgtgacgatctatgatccttgggcacgtccggatgacgtccggcgcgagtatggcttgaatgtcctgtccactttgccggacaagaagttcgacgttgtcatcttggcggtcgcacataccgatttcctgtcactggacattccggagctggtaaaggagcacagcgtggtatatgatgtgaaaggctgtctgaatccggcttgggtagatgatcgtctgtgagttatttccgtccgaagtctgccgggatctctccccattccgaagtttcccattttaggataggagtggtataggtattggttttgagccacttttcagctcgttcgatcatatcgaagatcggttcgttctctggtacgcgctctaagagtgtcttgcatttcttcttttttacccaaccgatggcgttccgactgtccgaatagatcggaaggctgcttcctttctgtttcagtagggcaagtccgtgtaccaaagccaagaattcaccgatgttgttcgtccctttttttaacggcccgatccggaagatctcttgcatggtcggcggatagacgcctcggtattccatgtttcccggattcccgctacaagcagcatccacacaaaggctttcccagatcggtttcccgaccggagtttttggagtcaggcctgcagccgctttgggggaagacgctgttttcagataatgctcgtatcctttttcaaaggctttcgttgcctcctctttggtttcgaacgatttatattttgctccgtcctgtccgtccacctgcgctttgcattcgccccagttgtcatatacgcccggagtgatacctttccatactacataatatttgttttttgccattgttctctgtttaataagtccttgtccgacttctccttcttccggtaggaaatcgattctatcctttgggaaaatgccttcggcttgccggataagtttgttttttcggcatctaatcgcttaccgacaattatcagcaaacctgtcgacaattaccgacaggcaaatcgttgggcatggaatcgaagaagtatgcggtcaaagataaaaatttatccggcacaaaacagaacttcttaacggaaaaagtttacatttgcaggaaacaatcatatagatatgaagcgtatatttctgattggatatatgggagccggaaaaaccactgtgggaaaagtgctgtcccggcagttggaactctcgtttatcgatctggaccactatatagaaggtcgctaccataagaccgtcgggcagctttttgccgagaaaggggaagatgcgttccgggatatcgagcgaaggatgctccgcgaagtcgccgcttttgaagatgtcctggtatcgaccggaggcggtgctccttgttttttcgataatatggagtttatgaatggggccggacagaccgtttacctgaaagtctcggtagaggaactggcgaagcgtttggagctctgcaaatcgacccgcccgatactggagggtcgttcgggtgacgaattgagagcctttattgccgaaagtctggagaaaagggaacctttctattcgaaagcgtcgattgtgttcgatgcggaagagatgatgaccgatcaggatgtatataagatatcacaagaactggcaacacgattatagagttgagagttgaaagtgaaaactggcacaaccttaactttcaactctcaactctcaactattaaattatggatagacaagggcagggggcttatatcccgcaggagctattaaaagaactcagtaaggcgagtaatcgcttactgataggtataccctgtgaacgggtagaaggagagtgccgtctggttctgactcccgaagcggtcgacatgctgaccgaccgtgggcatcgcgttctggtggaagccggggcgggcctggggatcaattactccgataaccattattcggaagcgggagccgagattgtggcgactccggccgaggtgtatcaggcggacatcatcctgaaaatcttgccgccgctgactgccgaggtgatgatgatgaagccgcgtactacgctgttttcaaccgtccagttcaataccttttcgcatgaagccttcgaactgatgatggctaaacggattacagctgtcgcctatgaactgttggctgatgacaaacagcgctgtccggtcctgaatgtgatctctgagatagaaggaacagcctctatcacgatcgcttccgagttgttgagcaatacgcagggcggaaaagggatcttgttaggaggcataccgggcgtttcaccgaccgaggtcgtgattattggagccggtaatgccgggactgtcgccacccgtgccgctatggcactgggtgcttccgtgaaggtgttcgacgacgatataaacaagcttcggactatccagcaggtattggggcaaggcttgttcacttccaccttccatccgaatgtgctgcaaaacgctttccgtagtgccgacgtggtgatcggggcgatgcgttacatcaatacgcgtcaccggtatatcatcgccgaagatatgatccgtatcatgaaacgcggtgcattagttattgacctcaggatcaatcagggaggttgttttgagacgacctgttgcctctgtccttccgatccggctgttttcgaacagtacggcgtactgcactattgccggcagaacatcagtaaccgtgtggcgcgtaccacttcgatggcactgagcaatatcttcgtcccgatgcttttcctgctgggcgatgccggtgccgtgcaggggatgatcaagagcgacctgggattcaagaacggagtctacatgtattgcggtaagcctgttaacagctacgtttccaatcgattcggtttatcatcgaataatatcgatctatacctctctgcgttttaacccataaaagttttgaactcgcaaagtttattctttactttgcgatgatcttaaatatcaacaagcgattaagctaatattaagtatattatggcagaacagacaaaagtaacaattctggaaaaggttgtcatccgtttttcgggcgattccggtgacggtatgcagctgaccggaacaatcttttccaatctgtcggctattttggggaatgaaatctctacattccctgattatccggcagaagtgcgtgctcctcaaggaacacttagtggtgtatcaggtttccaggttcatctgggatcccgtaaaatttttactcccggcgataaggcggacgtgctggtcgcaatgaaccccgctgcgctgaaagtgaatgtgaaaaacctgaaacccaatgcgatcgttttgatcgatacggattcgttccagaagagtgacttggacaaggcgcaattcacgacagacgatccgttccgggaactcgggcttggcggagtgcaggtcgtggcggctcctatctcgacaatggtgaaagacggcctggctgaattcggcctggataacaagtctgcgctccgttgtaagaatatgttcgcactggggttggtttgttggctgttcgaacgtccgctggatgaagcgatgcatatgttgcagaacaagttcgccaaaaagccggctatcgcacaggccaatatcaaggcgctgacagacggttacaactacggacacaatatccatgcttcagtctccacttaccgcatcgaaagtaagaaggctgcaccaggtttttatactgacgtgaacggtaataaggccacgtcctacgggttgatcgctgctgcggagaaggccggcttacggttgttcctcggaagctacccgatcactccggccaccgatatcttgcatgagttgtcaaagcataaggaacttggtgtcatcactgttcaggcggaagatgaaattgccggtatctgtacttccatcggagccagctttgccggttgcttggctgcgacttccacatccggtcccggtctggcgttgaagagcgaagcgatcggtttggccgtgatcgccgaactgccgctggttgttattgatgtgcagcgtggtggtccttctacgggtatgccgaccaagagcgaacaaaccgacttgatgcaggcgctttacggacgtaatggtgaaagtccggttgtcgtgattgctgcttcgactccgacagactgtttcgatgccgcttactgggcaggaaagttggccctcgaacatatgactcctgtcatcctgttgacggatgccttcatcgccaacggttcttccgcatggaagctgccgaacttggctgaatatccggaaatcaaaccgaattatgtctccaactacgatgagagtgaaaaagtatggaaagcgtatcgccgcgacaaggaaagcctggttcgctattgggctattccgggaaccgagggctttgcccatcgtctgggcggtcttgaaaaagactatgaaacaagcgctatctcgacagaccccgtcaaccaccagaagatggttatcacccgccaggccaagatcgacaagattgccgattatatccccgaactggaagtgatcggagaccccgatgcagacctgctgatcgtcggatggggtggaacatacggacacctctacgaagcaatggaaactatgcaggagcagggaaagaaggttgctctggctcacttcaagttcatcagtccgctgcctaagaacacggctgaagtgctgagcaaatacaagaaggtggtcgtagccgaacagaacaacgggcagtttgccaactatctgcgtggtaaagtgacgggattcaatccgtaccgtttcaaccgcgtaaagggacaaccttttgtcgtagcgagattagttgaggaattcacgaaaatattggaggcttaaaagatggcaactgaagaagtaaaatttcaaccgaaagattataagagcgatcagtatgtacgctggtgtccgggttgtggagaccatgccgtgttgaactgcttgcacaaagcaatggccgaagtaggagtggctcctcataatatggctgttatctctggtatcggatgttcttcccgtttaccttattatatgaacacatacggtttccatacgattcatggtcgtggtgctgctatcgctaccggcgtgaagacggctcgtccggacttgagcgtctggttgattacaggtgacggcgactgtctggccatcggtggtaaccattttatccatgctgtccgccgcaatgtggacctgaatatcgtattgttcaacaacaagatatacggcctgacgaagggacagtattctccgacttccgaccgtggtttcgtttccaagagctctccttacgggacggtcgaagatccgtttatcccggctgaactggctttgggtgcccgtggtaatttctttgcccgtgtgatcgatgtggatctgaagaatacgaccgaagtgttggctgcttctgcccgccataaaggtgcttccgtgactgaagtgctggtgaactgtgtgatctttaacgacggtatccataaaaagattgtcgataaggaatttcgtgccgaccgtacgattttcttgcgccatggcgaaaagatgttgttcggcaaagacaatgaaaagggtatcgtgttggaaggcctgaaacttaaagccgtaacgatcggtcaggatggttatacgctggatgatgttttggtacatgatgcacatgaaaaggataacaccctgcacatgatgcttgccatgatgagcggggatatgccagtcgctctcggtgtgatccgcgatgtggatgctccgacctacgacgaagccgtacaccaacagatcgaagaagtccaggccaagaatccgatccgtaacctgcaggattatctgatgagcggagaaatctggaaagtaaagtaaggcggtaagccgatctgtgataagaaaagctgtaaaccttgaaaaaagatgcaagggtttacagcttttcttatttatatttctatctttgtgaaacaaaagggtatagcaatgaagacaacagccgaaatcatagaaatcctgagagattacaaagcccgttccgccgaaaaatacggaatcgaaacattgggccttttcggtagcgtggctcgtggtgaacagaatgagaagagtgacatcgatgtttttattaagttgagaaaaacaagttattacacattgatggatataaaagatgatttagaacaagttttcaggcaaaaagtcgatttaataaccttgcatgaaacaatgcgtgctttgtttcggcgtaaaatagaacaggatgcaatttatctttaaggatcaaataacagataagcttctttttgttatacaaagatttgaattggcattgaaacgaacttccgatgttgcagactgcgatgatttgcttcgtactccggagggtgtcgatttatttgatgcaacttgcatgagaatacagactatcggtgaggcattgaaacaaatagatactgaaacaaaggagaagttgctagtctattatccgggaattccctgacgcaagatttttgccatgcgaaatattatttctcatgaatatttgtctgttgacccggagattataaccgatatcgttaaacataatttatcccctctgcttgtcgttctttaccgcatccaggatgacttaaatgccgggaaacacgatgctatttttggataaaagtgtctgatttgtaaattctatgttacaaaatggtagggtttgatgttaacggcatggaaaagaataattattactgaaaaatttccttaattcgatatgtactatgaaaatttgtattacttttgtaccgcgattaacaaggcgagggaacagcaagtaaaaacaaagatgatttgccttgtgttttaacattgagtagagagaaaagttatataaagtcaatcaattaaattaatttcaagatggctacattagatttaagcaagtacggaattaaagatgtgaaggaagttcttcacaatccgtcttacgatgttctgttcgcagaagaaacaaaaccgggtttggaaggctttgaaaaaggtcaggtaactgaactgggtgctgtaaacgtgatgactggtgtttacacaggtcgttctcctaaagataaatttttcgtaaagaacgaagccagcgaaaattcagtatggtggacttctgaagaatataaaaacgataacaagccttgttctgaagaagcttgggctgatctgaaagctaaagctgtaaaagaattgtctggcaaacgtctgttcgttgtcgatactttctgcggtgctaacgaagcaactcgtatgaaagttcgtttcattatggaagtagcatggcaggcacacttcgtaactaacatgttcatccgcccgacagcagaagagctggctaactacggagaacctgatttcgtatgtttcaacgcttctaaagcaaaagttgacaactacaaagaattaggcttgaactctgaaactgctacagttttcaacttgaagacgaaagaacaggtgatcctgaacacttggtacggtggtgaaatgaagaagggtatgttctctatcatgaactacatgaacccgttgcgtggtatcgcttctatgcactgctccgctaatacggataaagaaggcaagagctctgctatcttcttcggtctgtctggtacaggtaagacaactttgtctactgacccgaaacgtctgttgatcggtgatgacgaacacggatgggataacgaaggtgtattcaactatgaaggtggttgctacgctaaggttatcaacctggataaagaaagcgaaccggatatctacaacgctatcaaacgtgacgctcttcttgaaaacgttacagttgcagctgacggtacaatcgacttcgctgataagagcgtaacagaaaacacacgtgtttcttacccgatctatcacatcgaaaacatcgttaagccggtttctaaaggcccgcacgcaaagcaggttatcttcctgtctgccgatgcattcggcgtattgcctccggtatctatcctgaacccggaacagactcagtattacttcctgtctggttttacagctaaattggctggtacagaacgtggtatcactgagccgactccgacattctctgcttgtttcggtgctgctttcttgtcactgcacccgacaaaatacggcgaagaattggttaagaaaatggaaatgaccggtgctaaggcttatttggtcaacacaggttggaacggtactggcaaacgtatctctatcaaggatacaagaggtatcatcgatgctatcctggacggttctatcgacaaagctccgacaaaggttatcccgtacttcgatttcgttgtaccgacagaattgccgggtgttgatccgaatatcctggatccgcgcgatacttatgctgacgctgcacagtgggacgaaaaagcaaaagatctggctggccgtttcattaagaacttcgctaagttcactggcaacgaagctggtaagaagctggttgctgctggtccgaaattgtaataacatacataatgactctataaaagcgcaggacttcggttctgcgctttttttatatatatacattaattttatcataaatgttaggatattttaaaatctattcctacctttaccccaaattatctgttaatgtgggatgtgaggtataacatgattagacgtttattactggtcgttgggattatcgtttctttgtcatcgtgtggcggagatattgcttaccggatagaaggaaaactaaccaatctggaggatcagaccttatatgccgttttcgaaaatgaagatataaaggttgtagataccgtaacttgcgggaagccgggggaatttttgatcgaaaagaaacagggagatttccgggaagtgacgattttctttgctgataaaatgcattgggttacggcttatctggaaaagggagagaaggtgacgatcaccggagacgctgattatcccgctatgttacgtgtcaaaggagggcggatcaatgaccgtctttccacgataagaaaagaaatggctcctttattgaaagagcaggccgacttgattcgtcaactgaataagaagaacagggaaaacctcaacagctcgatcgaggaagcggatatggcttcgcgcctggcgaatgtaaaccatctgttgagcgaggaagctgctgccgccatcaagaaatatccggatgaagaagcttccgtcgtattgatacagcattattttaaccatcctgacgatacccggcaaatggacgaattgctggctgtgctgaatccgaaactgaacgacttttatctggtgcggaagttgcaggaatacagcacgagggcaaaaaggactgctttaggcgccgaagcacccggtttcaatgtgaagaatatttacgggactcctgtcagtctggattcttttccgaagaaatatttactgcttgcgtttacggcttcctggtgtgatatgtgccagacggaagacctctatctggatgaagtggcaatgaaatatccgaaagaaaaggtggatatgttgctggtcagtctggatgacgatcaagccgaagtgcggaaagtccttgcaaaggatagcatcggctggaacttggttaccgattccgccggacaggcagccatgttggttgatctgtataacgtaagcgccttgccccgctgtttcctgatcgatgaagaagggaagatcatcttgaaaacggacaatggggtcgagataaagcagacgttggaaaagctgatggagtaggaatttatgatttatgcaatgttgctatccataaatcataaatccggcctcataaatttaaatcataaatctttaactatgttagtcaaatcttacgctgccgccgtgcaaggcatatcggcaacggtcattacgatcgaagtaaattgcacgaaaggtatccaattctttttggtaggattgcccgatgtggctgtccgtgaaagccatgaacgcattatctctgctcttcaggtgagtggctacaagtttccccgtaaccgcattgtgatcaatatggcgcctgccgatatccggaaggaaggttcgtcgtatgatttgccgcttgcgatcggcatcctggcagcagccgaagagctggatgcttcccggctaggccactacatgatgatgggagagctttcattggacggcagcttgaagccggtaaagggaattctgccgattgcgatcaaggcgcgtgaagagggattcaaaggttttatcgttcccaagcagaatgcccgtgaggccgctgtcgtcaatgacctggatgtgtatggcgtttcgaccatcaaagaagtgatcgagttcattgcaggaagacgggatttggagccgacggttgtcaatacccgtgaggaattttatgcccggcaacttcagtttgaagcggatttctcggatgtacgcggacaggagaatgtgaagcgtgcgttggaagtagccgccgccggaagccacaacctgatcctgatcggtccgccggggagtggcaaatcgatgctcgccaaacgtctcccttccatcttgccaccttttaccttgcaggagtcgctcgagaccaccaagatacattcggtcgccggcaagatcggactggacacttccctgatgacgcaacgtccgttccgttcgccccatcacacgatttcgaatgtggcgatggtcggtggaggcgctttcccgcagccgggagagatcagcctggcacataacggaatcctgttcttggatgagttgcccgaattcaaccggagcgtgctcgaggtcatgcgccaaccattggaagaccggacgataacggtctctcgtgcccgcttatctgttgattatccggccaacttcatgttggtcgcttccatgaatccttgtccttgcggatattataatcaccccgatcgcccttgtctctgttctccgggtgctgtccagaaatacatgaatcgtgtttccggccctttgctcgaccggatcgatatacaggtagaagtcgtgccggtccctttcgagaagatatccgacggacgctcttccgaatgtagcgaagcgatacgcgagcgcgtgatgaaagcccgcgctatccaggaaaaacgctttgccgcgcatgagggtatttacagcaatgcccagatgacctccaaactgcttcatgaatacgccgtgcctgatgctgccggcctgtctttactgaaggtcgccatgcagcgcctcaatctttccgctcgcgcctacgaccgcatcctgaaagtctcccgtacgatcgccgacctggaagcctctccgaatatcgaggcatgccatctggcggaagccatacaataccggagcctggaccgggaaacatgggggacgtaagccggtttcatttattttaaaattgaagatcggaaaaagcattaggagaaaataaaatgaatgcctctggcgtgaaccaatatctttcgcctgcccggagcgcggcgaccgcctgtgcgtatggctgtccgtattcgacagaacggtctggacggatgttcccgtttatctcgatgcagacgaaacggcggctatcggtcggatcagccagtaagtcccagttgttgcgttttttatttaggataaaagtaccgcctcattcgtgtttatcctattattatttgtatctttactgccacgttattgactattcgacctagggcgaaaagcctttcgacttaggtcgaataccttttccaccttgggcaaaaaccttttcgaccttcgtcaaaaacatacaaagaaggcaggaaagcgataaagtcttattattcaccatttaatctattactaatatgacagcacgttacagaatggagcgtaatccggattccgggaagaacggcaataaaatgcctcttcacccaagattgatcccctatgagaccgtcagcattaaaaagttgatgaaatatgccaaatcccgctccacctattcggaggccgacattgccggcgccttgcagctgatcaccgacttggtgacggaacgcttgcgcgaaggcgataacgtggagatcgagggcctcggtttcttcagcgtttcgctccagtctcgcgcggtgatgtctaaaacggaactgaggagcgaatctgtccgtttcaagaatgtcaatttccgatgctgccagcagttgaagaaggccttgaagacgatgccgctcacgcgtatgaaaagttcaggtcaccatgcacccggcatggcggaccgggaggaacttctttaccgctatttggacgagaactcttatatcaccgtccgttcctaccgttatcttatcgggctgtctgactacagtgcgcgcaaggatttggccgcattggtcgcttccggccgtttggtgaagggaggcagccgtctgtttgccatctatacccttccgaaagaggaagacacgggcatccctcaacctttggtggtcgattcgaacttgcctggatgaaggccggataccgggggtgaagacaatccgagcgggtaccttcacctgttggggcttgttgcaaggcgggttgtacagggtgggtgaagctgaaatgacccagcgacccggaacttttgtttttagctgttccggtattccaacggccccatccccacatgccgcttgaaatatttgccgaagaaagacatattcgtgaaattcagcgaataggcgatgtcgtggatggaaaggtcggtcgatttcaactgtgccttcgcatccatgatcaccatagaggtgatgatctcgacacaggtcttgtcggtcgtctgcttgacaatcgtgctgagatgcgccggagttatgccgagtttcttggcataccacgcaacggaacgttgcgtggtatagttctgcataaccagatgattgaagtttttgcttatttgttctgctttggagagattcgttttgctttccactttatctttatacatggcactgactcccatgaatacacccgacaatagatgattcaaaatatgtttgtttaaagcaggcttgcaggtattatatgttttaagcagaagcgagaagtaatcttccagcagttcgacaggtttttctttcaattctatgattggggtatctttggccgcgtagtgcatgtctactgccattttgttaaggttcgattgactgataaaatttgaggaaaatcccatgaagtagatttccaaatctccttctacccgatatatttgcaaaattgtccccggttgtatggtgataaagtttcctggcctgactttgtagcgcgtcaagtcgatggatgcctccagatctccttgcaagcaaagcacgaatatttcggctttcagccggcatggataattggcatagaggttcagcaagccgatttcgcttttcgtcaactttccgattatccagtcttcgggcaggtctattttggggatgtcattatctatatacatattagaataaaagatacgacaaagatacgaaatcttgtttatatgtaaagtttattatgaaaaatcggacagttatgtgtttgtggatatatcatttgtgtatcataaataggaaattaaagaggtggccttaaatgcaaatcaaaaaaaacggacagcgaataatataaattgaccttgtaaggcttgaagaatcgggattactttgtgaccttgaaaatggaatgttaaacggaatagaatctggatggagaagaaacgtttcttggaaggagataacaagcgcttttgtgtggtaagccgcctgttgtgctttttttgtttgtttattgggatttatgcttgccaagtcgatgaagatggggtagtcaataaaggtactcttgcttttcggatgaatgtggacacggcgttggtgggtgtatcgacaaaagcttctgacttggcggactttaaggatgtgaatagctatgctgtgacgatcgcgcaggattcgggtgttgtggccgaatattcccgcttcgacaagatgccagccgaacttgagctgggagccggagcatatacgattcaggtgtcaaaaggaacagaaacggcagccgctttcgatgcaccttacttttccgggaaaaaggaatttacgattgtcaaggatatgacgacaccggtggaggtaactgccgcaatggcgaacagccgggtgacgatcgactattcggatgattttctgcaaacatataaagattataccttgtcgttgaagacgaacaagatggaattgcctttggtgtatgaaaaaggcgaatcccgtccgatgtattttctgtcggatgcttccggcacgaagctggaaattgcgatggaactggtcaatatctatggaaagactgtcaattatatggcgacaacaactatcaagcccaagcaatgggcgaagctgaccgtccgtacggatgaaaaagggttgaacgggattgctatcgatgtgacattaaacgatgaaacaaaggaaacgatctatgtgaatatcggaattccggatttcatggagaagttgaagggggcgccgtatattgcgtgcgatttgtttaagtgggaagatacgaatgtaagtatggaggaacctacagaatatgctaaagatacaaaggcggctaaagtagtgattacttccggaggaaagattaatcaggtattgttgacgattaaagatggaagttcgactttgattaatcagtatgatttggcaaatctgacagaagatcagattaaggatttggcggataattacggctttagtgcaccagagaaaatgaaaggtgaaatgcaggcagaatttgatttgaaatcggttattgcttctttattaggtaaatcggaagactcgtattatgagttatcattgacggttgtagatgctttgccaactccgaataggacttctaaatcggttagaataactgtaccggctgctgctaagcctaaggttagttggggaatgttcccgaataataaaacttttgaacaaggtactttggaaataaaattgattactcctctttctgacgtacctgtagatattgaggctcttgccggaataaaggatgtagcaatatctatagttggaataggggtagaagagcaggatgtcttcacattagatattccaggaattgcgatagcagaaagttctgtaagtagtgttaagatgaaatatagcgtagatgattggtttaataaattgtcgtgtggcgataatggaacagctaaaacatatatggtaaaatataaaattactgataaattggatagagttgttgaagactctcgttcgtttacggttacacctccagtatttgaatgggctatggctgaaaacgatggtgatatttttgcgaaatatgcttatttacgagtgaaagcgaatgatgcagacaaggtgacgttctatcataatggatctcaattgactgatttaataccgttaggacaagaggagaatggtgttgtttcatttgtttggaataatttgacagccggacagtcttattccaatattactgccaaatatgatggaggaaaagagctctctggaatttcttttacgacggaagaagaaaaacaattgccaaatgcagggtttgaagagtggcattttacacgcccaagcggtgttcaatattgggaagtttactatccgtgggctgaaaatggaacttcttgctggaatacaatgaatttattaacgacttcggaaggtggcagtaatggtggagcgtttaatcccaatcgtaatgcatatagatataatgcgaattctgggacaattccaactaatgataaacatttaggatcaacagctgctttaattagaacagttggttgggggcaaggaaataatgctacaggttccgataatgcaaaatataaaacggtgggacaattatatttaggtgtctatgacgagcaaagtaaagttccaaattacggaatagagtttaaatctcgacctagagaaatatcattttattacaaatatcaacctgttgataatgataaatttattgcggaagtaatcttactaaatgtaacaaatggcatggaaacagaacttgcaaaaggtactattagtataggaggaacaatagataaatatatatcagcaagaatcgttttaaattatacaaacatggttttaaaagtaagtaaaatatgtgttatttttaaagctggcacagaaactaaatgtacaacagtacctaagtttggcgatttatcagatggcgaatacgtcggttcccaactctatatcgatgatgtcgaactaatatacgattatcaagaataatatgaaacacctattatacacattagccatcctgcttatcgcagcctcctgttctaacgaagaaacggaacaggtgatgcaaggcaaagcctgtctccgatttcatgtttcaaccgaatctccggttgtgataacccgttctacaccagtgccgacggtaaatcaattatacgttaagatacaggatggtatcggtgcggttgtgaagcaagactctttgaagaccttgcaacaaaatagtccggtctttttggaagcggcggaaggcggtacggaatataaggtagaagtcttttccaatgaactgaaagatgccatactggataaaccctgtttttttgcttctgaaacatactctttattaccggaagagaccgttttggtggagctggaatgctgtttgcaacaatttcaagtttcttttaatgcaagcgatgcatttaagaaggcgtttcggacagatgataagttgcaaaccggagatacaaaattcaaattgactgtttcggatgcaaacaaacgtcaagtgtcttatgctttggccgatttgaataaatctgcctatttcgatggagcgaaaaactcttcctttattaaaatccatatcgtaggaactactttggaagggtttcctgtcgactattcggagacgatttcacccaaagatggtctgttggaaaagaaagaccatctgattatcgatctgcaagtatcggaaacaaaatcaatgatgttaaaagcaacacctgttgaatgatgaaatatagatatacatattacgtattgttatgcctgactcttgtcggtttagcttcctgcgagatgaaagacgaacttttaggaaaaggggaacagggtggttccggtgaagtcggcgtgctggatttgaagttgaaagttgtgcctccttcttatgggaatggcggcgtatcttccaagtcatcaagtacggaactgattgttccgaaagcggaagatatgatcgtgaaagtgtttaacgcatcgatggaattgcaggattatttcgagtcgtatgccgattatctgaaagaatcccaatatgtattggaacagggcacttattacatcgaagcctattcgggtgataattatgaagtgacatcggaatatccttattatgagttgttggatacatgtgtcataaaagccaaagaagtgacattggtagataaggcttgcgaattgcaaagtgctatcttgtatttaactctgtccgaagagtttttgaatgcatgcaaggatgattatgcaatcactattaccaatggttccggagttctgtctgtgggtaaaggagatgcccggatcgtatatatccgtcccggaatgaaaacgacggtgacaatccgtgctacggaaaagatcactggcaagccggtgatccggacattcggactggccgattcggagggaaagattaatccgcaggatttgtttaggatagagatcaaagatttggaagaagaaattgtaccggatgagccggaaaaaccgaatcctgaacctgacgatcctgataatccggaaaaaccgacaaacggcaattttaccataaaggtagatgtgacattgaatgaaactccgatcgacattactgtaccgagcggtgggggaaatggcggcagtacgggaggtgatgataatacaggcggtgagacggatggcgtgatctcgataaaaggggacgcgattaatactgacttggtggtgagtgtgccgaacggtatttcctcgtttagagtaatcattgattcgccattattacctgaatcagaattgcagggtatcggattaacgtcagattttgatttggtcagtccgggtggatatgctgataagttgagtggtttaggttttccggttcatattggaggtgaaacatctgtatcgtttaatatatcccaatttgtgccaatgctccaaatattgggaagcggtacaagtaattttcatttgaccgttaccgattcgaaaggaaatacaaaaactcatacaataacaattacgacttaataggatgaaaaagttgtcatatataataggttgtttgtttttaatgttgtttgtttgggtatcatgtgataatgaagataaccgtatgcaaacaacaggctatttggaattaggtgtatcgaaaaatgtggaagtggtcacacgtggtttcgatgtcaaggaccaatctttggcagtggatatttgtaccggagcgaatgattcggtcgtaaaacatttttccgattataatgatatggccggcgaacgtgtgttgttggatgtcgggacttataaggtgaaggtcacatctaatccttcggacaaactggagtttgaaaaacctactttttacggggataaagataagattgtcataaaagcgggtgagacaactcaaacagcaatcgaatgttttttaacttgtgtgaaagtaaccagtaagtttacaaagcctgttcaggataaattcgcatcctgtgtggcgaaagtcagtgatgcgacggggagctatttggaatatgatatgcaagagacacgcgctggttatttccaacccggttatctgttggtcgatttgacattgacgaacaaagaagggttgacatttcacatgtccaaactgatcgagaagacggaggcgaaagaccattatcatctggtattcgatttggtggatagcggtgaagataactcaggaatggacttcgatataacgattgattctgatccgaccaatgacgagaaccatacggtgacgatcccgttgccggaatcgggatatgggcaggaaccaccgttggtgaaagtgttggaagatggcaaggatagtaatggaatggtctctttggacaaaggagattccagaaacgtaatgttgaatatttcttctacgaatataggtttagaatctgttaccatgattgcgacttcgtctttgtttgatgaacataaaatttcatcatctttggatttactgaaattgtcggaagaaagtaagaagaagttagctgaaataggattggaagtccctgctttggatgataaaaaggcaatgtttacattagttttcgataatttgattacgcaattgccaggaggtacgcatacatttgttctctctgcccgtgatgagatggggcatgaaacggtgcaaacgatttctattactgtcaatttgcaaatcatgactcatccggtagtcgaatcggaggtgtgggcacattttgctacattgaggggatatgtaaagaacgcgagtgaggaagataaagcctcttataagttccaatataggaaatcgggaacaacaacttggaaagatgttgccggtgaagtaactgttgccacgaatggatcttccaatgtagcacaagttgcaacaaatttggatgcgagtacaaaatatgaatatcgtttgttgcaaaatgatacaaacagtgaaccggaagagtttacaacagaggatgatattcaattgccaaattcaggatttgaagactggtatacagatagtgatggattacctaaaccagcaaaggatgcaagctcctcgttttgggattgtggaaatgtcaactattttggtaagcatattatgactactcaagatgacgaaacagcgttaggacaaggatcttctgtaaaaatggaaacacaggaaacaatgaagattattgctgctggaaatatttttacaggaacttttgagagagatggtatggggggaattttgactttaggtagaaattttgagtgtcgccctaataaattaaaaggatattacaaatatacatctgcaaaagtctctgtgagtaaaggacatttgaatgaaggcgaagatgatttgtgttctctttatatcgctcttacagacgaacaaattacagttaatacaaataaaggaatttattttgatcccaatagtagtgccgtaattgcttatgggtctataagtgatgaggaatctaaaggggcagattcatttaaggagtttactgttgatttggaatataaagatttaaagcgtatacctaaatatattattgtagttgcctcttcaagtaaatatggtgactatatggaaggtggaaaaggtagtactatgtggttagatgatttggaattagtttatccgaaatcaatggaagaagtaagaaaatgaagcgtataatagttattttagttatcgcatttttatgtacaggcttaatgcaagcccaaaccaaaatccttggtcgtaaagtcttcgaccggggtatccagagtcatacttttattccgaaagggcaatggatggtcggatcgactttttcctattcggaacatgaggatgacaattataaattcttggtgctggagaagattgaaagtaccggttatacgtttaaagtaagtcctttcttcggttactttattcgggataatgttgcattgggcggacgtttttcctataatcgtacttatacggatttaggaaatatcagtttggatttggatgatgatatcaattttgatatcagtgatgtaaattatttggagcatactttttctgctactggattcgtgcgtacctatatgccgataggaagtagtaagatttttggtttgtttaatgaagctcgcgtgacctatggctatgggcagggtaaaaactcttcgggtacagataccgattataccggtacttatcagaccatccagaatttgcagatcggaatggcgccgggtctgacggcttttatcactaattttgcagctgttgaggtatcggttggcgtactggggtttaatatgaagtggaccgatcagacaactgaccagattgataaaggctcacggcgtagcagttccgctaattttaagatagacctattttcgattaatttaggtatgaacttctatttttgacgaggtatggatataaatcatataaaacgaaaagtgacaggttttctctgttgtttgttctttcttgtttcatgtatcgagaatgatattccttatccatatcgggaaggaagcattaccgatttccaggtggaagggcaattggataatacattggaaatagataagactaaagggatggttacggtagaagtgagcgatgcggttgatcttgcagctctccggatcaagaagttgacggtgactaatgaggctgaggtacggatagattctgcggcgtgtctcgactataacgcttttccacgaatcggattttcgtctttagacagtttacccaagagtgcagatacgcgggtggatttttcttcatctgtctcattgattttgcagacatatcaagagtatccttggaagataacggttaatcagacgatagaccgggctgtgcaagtcagtaaccaggtgggtgaaccggtaatcgatttggcaaatcgggagatgatcgtgtatgtggcaaaagaacaacatttggatcggataacggtgactaagatgcaactgggcggttcggtgggaattgtcgttcctgatccgacgacggtaacgaatttttcgcgtccttgctcatttgaagtgactcgttttggagtaacggaaacttggaaagtgacaattctgcatacggaaggtggtgctgtttccggtggtgaaacggttgcgatggccaatcgaatcattgtaaccggaatgattcaagaaggtaagattccggtaatagaatatagagaaaagaatccgtcccaaacgcgggtggatgatggttggcagacgcttccggcaagttccgtaactgtcaacggtacttccttcacagccacaataactggtttgaatccgggtacgacgtatgtatatcgtgttgtgattgatgatatagctggagaagaggtggagtgtaagaccgctgcgttagtgccattgaccaatgggggttttgacgattggcatcaagatggtaaattgtggaatccgtggttggcaacaggtgtttctttttgggatacgggaaataaaggagctactactttgggagacagcaatacgattccgacaggtgatacgagtaacggaaccggaaaggcagccaagttagaatcgcggtttgtcggagttgccggtatcggtaagtttgcggctggtaatatatttgccggttcgtatgtccgtacagatggtactaatggcgtcttgagctttgggcgtccatttgaaacttatccgacaggtttgaagtttaaatacaaatatacttcggctgagataaataaaagtaacgattccgattacaattatttgctgggcagaccggattcttgtcatatttatgtggctctgtctgataaggcagaaccttatgagatcaaaacaaagaagtcggaacggcagctgtttagcaagaatgataaaaatgttattgcttatggtgagttcatttccgctaagaccatatccggttatgaggaatatacaatccggttagattaccgtgattatcgtaaacccaaatatcttgtcattgtggctacagccagcaaatatggtgattattttacaggaggggaaggtagtacactttatttggacgaaatggagttgacttatgattagcgataacttgtttagtgtatccttagtcggattataacaactaatgatattcctttctttttaggttaagcaataaatgtgtacctttgcctctcaaaaagagaacacaaggtatggaaaaacagtttaagagaacgctgataactacggcgttgccgtatgcgaacgggccggtgcatatcggacatttggccggggtgtatgtgcctgctgatatttatgcacgctatcttcgcctgaagggggaagaagttttgatgatcggtggatcggatgagcatggagtgcctatcacgctgagagcgaagaaagaagggattacgccgcaggatgtggtggaccgttatcatggtattatcaagaagtcttttgaggagtttggtatctcgttcgatatctattcccgtacgacttcggcaacgcatcgccaggtggcgtcggacttcttccgtaccttatacgataaaggagagtttatcgagaaaacaagcgaacagtattatgacgaggaagcgaaacagttccttgccgaccgatatataaccgggacttgcccgcattgcggcaatgaaaaagcctatggcgaccagtgcgaagcctgcggtacatctttgagcccgacggacctgatcaacccgaaatccgctatcagtggtagccagccggtgatgaaagagaccaaacactggtatctgcctttggacaaatgggaaccgttcctgcgccagtggatactggaaggacataaggaatggaaaccgaacgtatacggacagtgcaagagttggctggatatgggattgcagcctcgtgccgtaagccgtgacctcgactgggggattcccgtgccagtggaaggtgcggaagggaaggtgctgtatgtctggttcgatgcgcctatcggatatatctccaatacgaaagaactgctccccgaaagttgggaaacctggtggaaagatcctgaaaccaagatggtacatttcatcggtaaggataatatcgtgttccactgtatcgtgttcccggccatgctgaaagccgaaggttcttataacctgccggagaatgtgccggccaatgagtttcttaacctggaaggcgacaaaatctccacttcccgcaactgggctgtctggttgaacgaatatctggtggatatgccgggcaagcaggatgtgttgcgctatgttttgacggctaatgctccggaaacaaaagacaacgatttcacctggaaagattttcaggcacgcaataacaatgagctggtagctatcttaggaaacttcgtcaaccgtgctttggtgcttaccgaaaagtatttcgaaggtaaggtgccggctgccggcgagctgaccgattatgaccgtcagacattgaccgatttcgcgaatgtaaaggccgacgtggaacgtctgctggatacctaccatttccgtgacgcccagaaagaagcgatgaacttggctcgtatcggaaacaaatacctggctgacactgaaccttggaaattagcaaagaccgatatggcgcgtgtcgccacgatcatgaacatcgctttgcagatcacggcaaatttggcaatcgctttcgaaccattcctgccgttcagcatggagaaattgaacaagatgctgaatgtggaaccgttaggctggaaccgcttgggatcgactgacttgttggaagccggtcatcagttgggcaaatcggaactgctgttcgagaagattgaagacagcgtgatcgaagcgcaggtacaaaagctgttggatacgaagaaagcaaacgaggaagccaactacaaggcgaaacccatccgtgagaatatcgagttcgatgacttcatgaagctggatatccgtgtcgggaccgtgttggaatgtacgaaagtgcctaaggcggacaagttgttgcagttccgtatcgatgacggtctggaaaaacgtacgatcgtttccggtatcgctcaacattacaagccggaagaccttgtgggcaagcaggtttgcttcattgccaatctggctccacgtaagttgaaaggtatcgtttccgaaggaatgatcctttcagcagaaaacttcgacggtaagctggctgtcatcactcctgaaaaagaggtaaaaccgggcagcgaggtgaaataatctggttaatccttcgttgtagtgacgaaggattaattaatcggaaaacagataatataatgttggaagaacagatacagatggtcgacttgcatggacaatatctccggttcaaagaggagattgatgaggccatgcaggtggtgatcgacagttgtgcttttatcaatggtccgcaggtgaaaacctttgccgggcatttggctgattatcttcaggttccatacgtgattccttgtgctaacgggacggacgctttgcagattgctctgatggcattggagcttcagcctggcgatgaggtgattctaccggcatttacttatatagcggcagccgaggttgtcgctttgttagggttgacgcccgtgttggtggatgtcgatccctgtacctttaatatcgatccccggaaaatagaagcggctgtttcggaacggacaaaggcggtcgtggccgtccacctgttcggacaagcctgcgatatggagccgatcatgactttggcagatgtctatcatctgtatgtagtggaagataacgcccaatccgttggtgccgattatatcttttccgacgggcgggtacgaaaggccgggacgatcggacatatcgggacgacatctttttttccatccaagccgttagcctgctatggcgatgggggggcgttgatgacttccgacgaggcgttggctgcccgtatccgcatgattgccaatcatggccaggaatgcaaataccaccataggcggatcggatgcaactcccgtctggacacgttgcaagctgctgtgctggatgtgaagttgaagcatctggaggagttcacggaaacccgtcggcaagttgcctctcggtacgatgaagctttgtcctcctgcgattcgttggttctccctgcgagatcgatattttcgactcatgtctatcaccaatatacggtccaggtaaaagatggcaggcggaatgtccttcaatgcctgttgaaagaacagggaatcccttccatgatctattatcctgtaccagtgcatcatcaggaagcttaccggcatatctcccgtgtatctggtaatttggacgtctccacccgtttgtgcgaatccgtcctttccctgcctattcatacggaaatgtccctcggacaacagcaatatataacagaaactctaaaaaagggggtgtgtcgaaactatcctgttcccgcacttgacgcgggatagcattaaaaccgaccctataaaaatctgattgataaggtctgtccttttgcggctccgcgtcaagcgcggggacaaggagattttgacacacccccatcgaatgcttatggataaaaagataaaatttgcagttatcggttgtggccatatcggcaaacgtcatgccgagatggtgacacgcgatccgggagccgaattggtggccctttgtgatattcgtcctcgtgaggaattgggtattgaggcatacgatgtcccgtttttctcttccctgacggagctattgcagagcggaatttccatagatgtcgtaaatgtttgtaccccgaacggcttgcatgcagcaatggccattcagactgtcgaaaccggttgtaacgtcgtgatcgagaaaccgatggcactgacgcttgctgatgccgagaaggtggtctatgcttcgctgaaataccgtaaacaggtgttctgcgtcatgcaaaaccgttattctcctccttccgtctggatcaaggagatggtggattcgggtaggttaggcaagatctatatggtccagttgaattgttattggaaccgtgacgagcgctattataaacccggtggctggcatggcgatgccgttttggacggagggacgctttttacccagttctcccatttcatcgacattatgtactggcttttcggggatatctgcaatatccaggctcgctttgccgatttcaaccatgccggacttacggcttttgaagattcgggctttgtgaatttcaacttcgtgaacggcgggatggggagcctgagctattccacttctgtctggaacaggaacatggaaagcagtatgctgattgttgcggagaacggaagcgtgaaaatcggcggacagtatatgaacgaagtcgaatactgtcatattaaagattatgaaatgccggaactggcgccgacgaatccgggaaatgactacggcccttataaaggttccgcccagaaccataatttcgtgatccgcaatgtggtccgtgtcctttccggtgcaagttcggaatgcattacgaccaacgtactggaaggcatgaaggttgtggacatcatccagcggatttatgcattgaagtaataaatgtaagatagggacggggcggcgtttaaatatggattccgtattcatgctttacctcgtccatcacaaaggtgctttcgagcgatccgaggctgtcgatcgtgcctaacacgttcaagataaactcctggtaatacttcatattcggtgcatggatcttcagcaggtagtcgtaacttcccgatatattgtagcattctgtgacttgcggaatttcctgtatgattcttgtgaactccgccgcaatctctttgttcagtctcctcaacttgacactgcaaaagaccacgaagccctggtttagcttttcggcgtccagcacggcaatgtacttctttatatatcctccgttttcgaggcgtttcaggcgttcgaatacgggtgtcgacgagaggctgacactcgcggcgagctcttttgtggtgagccgggcattcgattgcagggtacggaggatctgcaagtctactttgtctaatttctcaagtgtgttcataagaataaaattctatcagaatccttttttcgatcctgatacagtttatgcgttctgttgacgaccgtaaaaatagcgttattttctgtattttccatatatcttgtctgatatctctgtctgctatagttttgctggaaaatgagcaagaagaacaatttaaaataatacgactatggcaacaaagaaattacatttcgagacattacaggttcatgtagggcaagaacaggccgatcccgcaacagatgctcgtgccgtccctatttatcagacaacatcttatgtatttcatgattcacaacatgcggcagaccgtttcggccttcgtgatgccgggaatatttatggccgcctgaccaattcgacccagggagttttcgaagcgcgtgttgccgctctcgaagggggagtggctggtctggcggtggcttccggtgcggcggccgtgacgtatgccttgcagaatatacttggagtgagtgatcatattgtggctgccgacaatctctatggcggttccttcaatctgattacgcatacgttagcgactcagggcattacccacacgattgtaaatgtcaatgacttgcaggcgttggaggctgctatccgggagaatacgaaagcggtgtatgtcgaaacgttcggtaatcctaattctgatgttaccaatatcgatgctgtggcggaggtggcccatcgtcataatattccgttgatagtggataatacgttcggtacaccgtacctgatccgtccgatcgagcacggggccgatattgttgttcattccgccaccaaatttatcggcggacatggatcgagcttgggaggagtgattgtggacagtggcaatttcgattggaaagcaaatgccgataagttcccgaccttgggcaaaccggacccaagttatcatggggcggtctttgccgatgtggcgggtccgacagctttcgtcactcgtatccgggctgtcattctgcgtgatacaggagctacgatctcgcctttcaatgcttttatcctgctgcaaggtctggaaacattgtctctccgcgtggagcgtcatgttgccaatgctctgaaagtcgtcgagtatttatccaaacacccgaaagtaaccaaagtgaaccatccggctcttccagaccatccagaccatgaactttataaaaagtatttcccgaaaggtgccggaagtattttcactttcgagatcgaaggcgggcaggaagcggcctggaagtttatcgattcgctggaaatattctcccttcttgccaatgtggctgatgtgaagagcctggtgatccatccgtatacgactacccattctcaaatgactccggaagagttggccggacagcatatcactccttccactgtgcgcctgagtataggtactgaatatatcgatgatatcattgatgacctagaccaagctctggcaaaggtttgatgtaagatggcaatgtgtttttgttttgatgcaagtgtaagttgttttcgacgttgtcgagaatatatttgacgttgtcgggaatatatacggcaatgtagaaaacaacttacgcttgtatctgaatgaagaagtatgggttcgaatttttattttatcctgaatagtttgtttttgtaatcaataatcacggtgttttcaaagaaataagcatttccggttattccccagacatcgagggtactataaatactatcccaaaggccgtctttggcgtagtagactttcgaattgttcaaggcttttccgccgaactcgatcggtttggttacattaaagccataaaatgttatttcttgtccccaccataaaggaccgcttagagagtcgacaatagtaaggtctgatacgctccaagctctttcttgtgtcgttattaactggaaagggcttgaacctgtatcgaacaatactttacatgtttttccattaatccgtaaaggcaattttatttccccatattctgattcaaattcttcagccagcagattttcgtattcagccggtaaaaagtctgtgattgcaagcctgtttgatttgtaatcaatgattaagactttatcttgcaccatgtcggatgcgatcgttccaatatgcttgggggtatttgaatgaagtgaatctttagggattttatttccgaaattctgcatgaatccgatattggcattgctaaactccactgtccctatttgcaggttgacattcttatacatcccggttgaatcttttttgttcattaaagatggggcttctttgagataaggagcaaaagtattcccgtaaaagacagaattatatgctcctaaatcaaactgcattgtgaattcgtagggtaaattctctatttttaccggaacatttagaaaagctttttcaatgtatatccccgaaattgtatcaccttcccaactgaagggaatccattgcagcgatggttttcgtgaacaatttgtaaagattaatagaaggagtacaaaagtaatcccttgtttgtgtatttccataaatggtgattttttgttgttagaaaatagtttatttcggtgtctcgttgttcttagccaatgaaaccaagcctcccatagcccctaagttcatggtgtcgagtgccgaactcggtacgataaccatcgatcctttttcttttaagccttcgaacagcatattcatccctctaagatgcaatgccacaggattgtcggtatatttcttactggcttgttcgaacttttctgcgatttccgtttctgctgttcccaagatgacgcgagctcttctttcacgttcggcctgggcctctttgctcattgcttcggccaggtcttgcggaatggcgatatctttgataccgacagtctggcatgtgatgccccacggattcgtatttctgtctaagacctgttgcaaatcctcagctatcttatcgcgttcctgcaagagatccgacagttcgtgcttaccgatggtatctcttagaccagtctgtgtgatatgttcgatcgctttttggtactcctgtacttccaatgcagctttttccacgtcccagacggtccaatatacgactgcatccacatttaccggaaccgtatctttggttagagtttgttcggccttaaatgcacttacccgtacacgctggtcaatataagtcgatacactgtctataaccgggataatcataaaggggccgggacctttcaaaccgttgtatttccccatacgaaggactaccgctcgttcccattggtcggctatgcggattgcagaagtcaccaacccggaaagaagaagcaagaggatgaatatcggtatgtttataatcttcgaaacatacaaaacggctgatacgataaccagtatcagcaatacggaaagggatatgggattgaaccaacccttgttaattacatttgttgtcatattcattgttttttagaagtttcgatatcttttaattctcgaataacctcatttaggctgaaaccgtaactcagtacaacggaagaaaattgtgtacaaatttcttttaacttgtcttcccgttctttttccagtactacatgatctgttttgctaataaacgttccggttccttgctgagtttccaaaatattcttgatctccaattctttataagctttggataccgtgtttaggtttacctttaactctacggcaagtgctctgaccgtaggaagctgttctcccaacttaagttgcccggatgctatgccaaacctgatttgatcaatgatctggcggtatatcggcataccgctagagtaatctaataaaaacttgatcatatgattttatattattctatattaatattgtactactattatagtacaaaaatacaagaataaattattccacaaaaactttttgtggaaatttttgaggtgtatggatgaaacttttgtgtttaaatagactttaagaatacttctttttattttttcccaaaagctaagaacatatagtttccatatattctcctggtgtcatgttaaattctttcttgaaacaaacactgaaataatgtgcatctttaaaacctaccaaataggcaatgtctgaaacattaccccttctttgtttaatgagttcttttgctgtattcaaacgtatactacggataaattcattaggagacatatttgccaaagacttcaacttgcggtataacatagaattggacacttgcataatttcacaaaaatgtttgacatcaaactcgggattttccatattctttttgacaatatccatggcctctttcaaaaacttttcatcgtatgatgagatcgtaatatctatattctgtgtcaaagggttggatttaaagctatctataaccctttttctattagagatgaccatgtctatatttgcttgtaacacgttaaaattaaatggtttggttatatatgcatctgcgccgcagttcaatccttccaaatagtctttatcatttatttttgccgtaagaagtataatcggaatacagcttgtctctttctttctcttgagttgtttacatagttcgaatccatccatgataggcatcatgacatcactaagaatcagatcaggcttaatgtcttgtacaagtttcagtccttcctccccattagtggccattgatatcgtatacttttcttgtaacaaacgctgaagtgaatctcgcaagtcttgatcatcttcaataaccaaaacggaattctgttttgaagatttttgaatttcagaattggactgtgattgttggatggctgctccttcaggcgagtcgtttacaatgaaacgatgttctatcgtttcatttatttgttcgttgctatagcttgttttgttgataggtattctgattgtaaattctgtccattcttccagttcactagttacactaatcgttcctttgtgcaattcgacaagacttttagttaatgctagtcctatgccattccctttaaggcccgattgtttaaaactgttttcataaaaacgattaaatatataaggtaattcatcggttgcaataccttttcctatatttctgattttaataagtaatgttttatactgaaattcactttcctgatcctcagctttaaggagaatctctatttttcccttaccatcctgatagctgaactttgttgcgttagaaagtaaattatataaaattttatcgattttattcgtgtcaaaccaagcagcgatatgttcaggttccgactgcatacataagctgacatttttattctttgctaataaagcaaagttctcttgacaaagattacagacaaaagaacttatatctccataagatatgttgagttttaatttattgttttccagtttttgaaaatcaagaatctcttcaatcaacctattaagtctgatcgtattcgactgggccgcttttaatattttattatcaatattatacatacgcttaagctcctcaatggagcaactgataatagataacggcgtcaagaattcatgagagatattggcaaaaaatttgaacttggattgatgtaattcttccgcttttattctctctatttgttcgaccttcacagcttctttgaatttatacctataattttgaaaacgataaaaaacataacctgaaatagttatcaaaaacagataacataccaaagccaaatttgttttgtaaaaaggaggaagcacttttatgccgaattcttcataattttcattttccactctaccttcattcaatgtcttgaccaaaaaacgatattcacctgaaggtaagttggtgtagaatgctgttcgtgatgtcgcatccgtgtagatccaatctttgtcaaatccctccaatttgtaagcatattttttcttttcaggatgtacataagaaagtgcggcaaatttgatcccgatattattatcagaagaagtcagagtaatgtttttagagtagagtggatgagtttttccagataactgttttttcttcttattcggcagttcatcaaaagatttgtggaaaatcttaaaatcactaatgatagttggagtatgggttgagtcatagttcaccaagtttggatgaaatatgcagaaaccactaggggttccgtaatagatctgtcctttcttgtcattgaacattgaattttttaaacagcttttatccaacattccatctctatcatcaaaaataagtgatttatgagtctgactgttatacaacaccactcccttattagttcctaagacaagagtcccgttcacttccgttatattaaaaacgatatcgctaggtatttcctgtatattaggagccggttcaaaccagtctttttcttggttatacttctgtaagccataaccatttgttccaatccaaaggttccccattttatcctcatagatacacatgatctcatcagcaacaagcagtttgtttttactgttataagttttaaaagacagtttatgcacattggatcctgatgccagactgtatagcccatcaaagtaagttccgagccatactgtacctgtgtgatcctgataaatacactgtatgcggttataagtatcataagaaagtgtatcattattagtcgtaataatatttagtccctcatcagagccgatccaaatattgccatccttgtcacttatgatagaattaatacaacttccgatttttgtttttcctaaatgatgaagataatactggcaggacgagatttctctatcttttaactgacaaattatcaatccgccaaattgtgtaccaaaccataattcctttttagacggatgtttgaatataaattgcacatttccaggccattggttgaatagttcattatattttgatatttctttataaccggtattttttcccacttttttgtcataaaaggaaaacctgattttatcgactccaagtaataaaacatttttattccattcatacaacgcattcacttttaagttttgatatggctccaatgaagatttcatcgggtaattggtaaagatctttttttctttatacgcgatataaacacctgaatttgctgttgctatccaaatattcttttgattgtcaatgaatagatcattaatatcctcgttggaaataaaaccagacgaataaacatcggtattaattggtatcagtttattgttattatctatcctatatagcccttgattagtccctactaaaatgtttttgtccggaagttgctgtaaacatttgaaaatgcactcataatcagtctcatacccgaactgagtatatcgggcgtgtttagaagtttcccgattgttcattttggatacaccattaccccagttgcatatccaaatgttttcagctgtgtcttgcaataaaaaattggttctattcaaaacggttacttcaggatattggtaaaaacgttgttttttcacatcaaaacggcatattccattatcaaatgttcccacccaaatatctcctgatttgtcttccagtaatgcgtgaattgaatttcctgctatggatgtttcatcattgggacgatttttatattggaaaaaagaaccggtttgtctattatattttaaaagtccaacttgtgttcctacccataacgtactgtcacgagagatcagcaaagaatgtataaaagagttaggaagactgtcattgctgatacaaacaatcttgtcggtcgatttatccaaaaagtgtaacccttgttcagtcccgatccacaagttatgatcaatgtcttcaacaattgcatttacaatattactttgcagcaattccggaaattggcttgatgacttgtatgtcttaaactcatatccgtcatagcgacagagaccattgtttgtggcaaaccacataaatccgtcactgtcttgaagaatttgattaacatgtttatcagggagaccttctatattgttgatcgcccgtacattataatcattccatgccggataggcacaaaaagttataaaaaataagtataataatagtattaaaattttactcataaaacaaagatttctaatacattattaaatacatagcaacctgtatcttttgattttctttatttacgcaagccccaagcattttttgatactaaagtaatttaaagtttccacataatccaattttgaatttatatattttttattttgactatttatttactaaaaaacgagtttatagcatcactgtcgacaatctgtaactctccggtaggagtattgactgaatgaagaaatggcttgagcgattcaacccctgacagatcattttttatcatattgctatatgttttattttcatatgttgccccttcgtcttcaggtatatttttgatatttccaaggtaacaattatctttaaaaaaattatttgttgaatttccaagcaagaaacagctgttttctgccacataaaacaggttctcacatactgttgtactgtctgcatctccataagattgtgttgcgcttaacaaacatcgctgtacgtcggaattgactttcttggtcacatgaatgatattatgccgaagtgtactgcctttagccggtcctgaaatatgaatactcggagaaaaaaatcctgttcctattttcttcgttctatttccgtcgtttatgctgatattaccctgtatcagcgtgttatttgttccaatgttttctggcattcctgtttctccggtattacaaatcagcagaaagcctccttcattgtcatggctgtaattatattgaataatagtattgttacaattattatctgaatcaaacccttgagcatcgccaggagccttatgatcggaaacttcattgaactgtatgagtgtgttgtcacaactccacggccaaattccagcagcaaattctccatcaggtaacaggtccggacaatttttgattcgattatactcaattacagcactatcgcatcctataggaacgataccatctcctggaactccttcgataagattgtttcgtacaacaacatgacgattcggatgccaaaagtcacgtgttacatatccccaccaaattattccgttccgctcacaacgacgaataatacaattctctattgtcagtccgtcaaagatactcggtttctctccttcattcacaatatatatccccgatcctccaccttgcttttttacgagactaccgttcacatcatgaatatacagatttcttaacgtgatcgaacgagctgtaccatagttttccaaatgaacttttacaccggtcctaccaggtaatctatcctttccggtattaactatctccaaattttgtatggtaatttgagaagagttatagacatacacggcataaggagactggtcatatcctatgatacaaggatcatgtcccttatctccatatccatcaatgattatgggagcttctgctgttcctgtcccattcaaataaagttctccgataaatgtctccccttttttgagaagaatcttgtctcctggggagagtttcagacctcgagtctttgctaaatttttccaagctttatctggagatgttccattgttatcatcacttccgtttgttgcatcaaaataatatgaagtagaattatcggatgataaatatcctgatggtgaaatacaggcattaagaaaaaaaatcagaaaaacagatatatatttgttcatatttttgattgccttccagaaaaataacatttgttttttgtctccggtaaatattttttgcttaaaaatgtctacttgtttcatttgtttataatttaaactcccggcggattatttccgccgggatacggttcaccatcctggattttgttccaattccggattaatatacctctccgattgtggaatcggatacagatacatacagtctttaaatattcttttctctaccaaaacttttttgtaactgaatgagccatcttctttttttgtaatgtcaactccatatatgtctgttgtctgatctgcaatcttccaacggcgaatatcccaaaaacgatgatcttcaaatgaaagttcgactctacgttcatttcttaacttggctttaaactcatttaaagtcagattatttggaaatggtggcatgtccacatgtacacggcttcttacaatatctacagcttctttagccgacatcggatatccatctttatagttagggtctccatatgcttcaaccatagcttccgcaaaatttaacaagatctcgctgtaacgcataatattccatacatgtcgtttgcttgtcacgaattcgcttttcaaactggtgcttccgtctacatattttcttaagtagtatcctgtaaccgttgcatttttttgtggctttccacttcttcctccgtaccaacattctacttgctcatcatatacccaccaagctccgttttgggccaccaattcatacatacggggatcccttccttcatatggattctgtgaatcatagcttggatccatatgttcatagcctgcatcaggtgcaaccggcaatccacttgcctgcatttcatacgattcgactaagttttctgttgggcaatgtcccgtattaccaccaccttcgatacctataggaaagttaacccgttcaaaccagttatcttcccgttgcattactccaaaaataagttcattattattagaatagttattattccaaagactccataaatccggtaacggcatgtaaccgaaatcccaagctttttcgatgacatctgcagcggcacgtgcagcagacttccacttgtctatattgccggacttattgaacaatggacttgctgaatatagtaaagctcttgatttcaaagccattgctgcgcctcttgttgcacgccctgtttcgctttttatcagttctttgtaactgataggtaaatgaggagcaatcgcgtcacattcatctacgataaactgaataacctcatcgaatgacgtccttttttgcatgttggcttcttcttcagaaagcaaagtcgtaataagaggaatatcaccataacgtttagccaattcaaaataaaaataggcacgtaagaatcttgcctcgtatggataatacttgaactgtgccatgatatcctcataatcttcgttatgcttcaattcatcgaattcctgtccttcaacttcttgaagaaacacattcacagctcgtatccccctaaaataattccatcgatcatccaaagtattaatagtactccaggcaccattgttgaaactatgtacaggtgacagtttgtcaacataaacagcttcgtcacatgctgcagaacgtaatgcatctccaccaatcgtaccaaatgcggcaggaacataagagtatatattagttaggaaatcccgggtatattggaaactagagaatactgcatctttttccaagaaatccgattcatcatattccagataattacaagaactggtacaaagaatcaatatgctaaatatcaataatttatttttcatcttttttatttttatgataaacattagaatgcgagatcaaaaccaaaatgcacagaacgttgcgcagggtaagtagaccaaattacttccggatctgtttcatttacgttgtctatggaaaagaggtccatacctttagcaaacaacttgaattcacgtaagcgtaaaggctttatacaactttcaggcaacttgtaataaatttctgctgagcgtagttttaaaaaagaaatatttttcatgaatacggaatttccacgatagttatttgcactttctgtcgttgtaagacgcgggtatatagcatctgtattgtcttttcctgatctccagcaattttccagataatgttctgaaatagtctgattattcattaggggagcataaaagcaacttaggcttcgttgtatagtataatggccggcaccttgaaactgagcattgattcctaatcctttatattcgaaatcgaatcccattgaatagaataattctgggcagatcgtattatatcccatcggtaccacatccaattcatctattcgattatcaccattctgatctttatatttcaagtctccaggatatacggttgagaatgtttgtatcggactattattaatatctgcctgatctttgaagaaccctatagcttccaacccgtaaaattgtcctaaacgtctgcctgtcgatttcaagtacatcgtaaggtttaaaagcctcgttcatgtttacaatcttgtttctagcgaatgccagttgagcattgacattaaaaaagaaatccttcatctgcttgcctacgttcataccgacttccacgccataattattaacaatgccacttggagagttggaagccgtagctccaaagaaaccggaagtaatgttgccatctgcaaccataatatcatatcgatgatcgtaatagctttctacattgaagtctatcaagtccaatattcgtatatcaactccgatattcgctttactacttttttcgaatgtcgcattcaaacttggcaattgtccttccgcaatgcctccatttgcaatgaagtcatcaccgaaaacaaaacctccacctcctccaaaaggatatttgtccatatttttccaaacgtcatcgctccctgttaatccgtaagaaagccgtaatttaagcaggtctaaccaatcgatattgttcaaaaaagactctttattaagtagccaagctccggaaattgcaggaaatactccccaacgattggcttttggtaaacgactggtccctgaagcagcgatactaaagtccaaatagtatttgttcaataagccataatggcctgaagcgatgatgtcttgatgcatatacgtattatattgaccgagataaacatttttatcctgcttataacgaatagaagcgaacaaattgctttgggaaaaatctttctgataattcaaagcaaattgaatattggaatgtctgttctgattgttcagccaactgttgaatcctaactgtttttcctcctttccatattgggtgtttaccgtatcggttggaataccgctattgtctaaatgcgcaatattggactcatacaaatattgttttgaacgagcatcccatgtctctgaataggcatcaaaaccaatacggaattctgctgacaaccctggagccaaagcttccagatcttgtgtcaatgtcagatccgccaataatgtacgggcatgagatgtggtatatcctgtcgatgatgactcggcaaccggattcttcggatacatgtttgatcccccccaaataccgttatggctcctgacaggatatgcattagcaggcaaagcatatagggtttccatgagcactccatctgaaatactgccaggagaatatttttctttcagcttaccagacaaattaacctttacccgggtagacgatgttatgtctatatccaagtttgtacgtacgttgagtatcgaattggctaactgagtggaatagcttccttgatccgtattctttaacaatcctctatccgatatgaaattaatcatcgaataatatctgatccggttggatcctccgcttgcagtgaaattcacttgatctcgctgcccatgatcccgtaacgtttcattaaaccagtctacattagggaataaggttggatattttccacttctataagcttcaatttcttgttgggtatatctgggagccagaccttcgtttgccaaaccctcattaaccgcttcggcataagtggcggcatcagccatttggggtaatcgtacaggtgtagtgacgctatgctgataggaaacatgaatgtcagttttaccttttttccctcgtttggttttcaccaagattaccccgttagctcctctaattccgtatggagccaaagcagcagcatctttgaggatcgttatttcctcaatttcctccagaaccagtgaatttatatcacgctccaaaccatcgacaaaaacaagtatcgaattgttattaagcgaaccgattcctcggatattcatgcttggatatccttctccatccccatactctccgttttggcggataaacaatccgttgagtttcccgtagagtgcattggcgggattaatattcgaacgtttcatcaattccttcccactgacagtagaagcagaaatggtcgtttcatcaaattgtaacatatcagatcctgtcgttttttcttgtgcccagacagaagcaatgcataaaacaggtagtgatatgatggttattaatttattcctcattttattattctgattttgtattaatgactggttagcatcaccatcccggattttgaatcaatccgtacgatttgttgatttcattactgggaaatgcacttaaataccatttaggggagaatttcccaggatttgcccattgtctaagttctccattttcagccggtttgaataatttatattcatacttgaactcgctggtttccggatccttagtaataacaactcggtgtggagttttttggaagatatccacccgcttataacgaatcatatcaaaccatctgacttcttcataagcaaattcgcaaacccgttcgttcatcagtgtttccagaaaatcctttttgttcaatcccgctttcaaatgaccgatattaacgcgatcacgcaatttattgacacattcataagctagtgccatgtccccgtttgtctggcaaatagcttcagcatatcccaaatacaactcaggtaatcttaaataaggccattgaaccacttttccggatatctctgcaggccattcaaacaaaggaccgccaccaccatcgaggatgaatttacgtgggcgataaccggacatgaatgctccatatgatccttcaaagtcttgataatgtttacctcctacatatatttcagcaatacctccataatatttgtctccatttacaactactgtttcatataagcggggatcacgttgttcatacgggtgtttcggatcatataatttactttctgtgataggtaaaccatctatcattggaaacatatcaacaagttcctgtgtcccacaggcagtaccggcatcaccggctgtttcataatagctccatccccaagtccaataatcaggtacggtataaccataatgtgtagcaatgattgcttctcctgtaccccgatcaagataaccggaacgaaacgcttgtctgggatccgatttatagactaaaccatattgtccattcttattcaattcatcgaaaaatgctttatgagctgccaatgcttgtgtccatagttcaggtttataacttccaaaccacatcaaacgtttatccgctgcttcacctggcatatatggttctgaactgttaaacaatgggctggcagcaaacaataggatacgtgcctttagccccattgccgatgcttttgttaatcgtccttcccattctcggttttcagcagcagacatagcccaaggcaatacatctgctgcctcatccaatagatttacaataaaatcaagcgtttcctgtacagtacctctttctttttgcatatcttcattcgctgtgtatgcatgatccacaatcggtacccctccataatggcgaaacaaatcacaatagtgcatagcgataataacttttgcttctgcttttaaacgttgtttttcagcctctttcatatcaggaactcggtctacattttcaataaacaaccatgcgcgacgaatgcctaaccaacaaggtctttgatagtagctgtatttggatgaatagccattattttcataatcggcagaataagtgccattataatgtatagcagctcctgatacaccatcagtccaaacattggaataaacaaggtcggtcaggcaatccagaggatctgagcccatcagttgattaccttgattacctaagttcagaccataatgcaatgtggcatacgcactccaaagggctgtccgtgcatattgcgcattagaataaattacatcgatatcgacatcattggaaggagctttttctaagaagtcatctccaaattttaaatcctgacaagacaggaaagaaccgataaatcctgcaaggacaaatatatgtttaatatttattcgtatcatattcaacaatatcaaaaattaagattaagaccaatattaaaaatcatctgaagaggatattgaaactgtttgtcgtcagttgcttccggatctgctattttcaaatgatcaaatgtcagtaaattttcgccagaagcgtaaatacgcatatttttcaaatgaatctttttcatccactcccccttgaacgtatatccgatttgaacattttttcagacggatataggaagcatcctttagccaaagggttgaatttcgagtgtaattattcgcatttgctgcacctgaaaaacgaggcgttttagctgtttctgcggtttccggtgtccaatggtcatcaatcatatattgtaacagtccgtaatttccaccgccgaaaggaacacgtaacccagcacttataaagcgtgacacctttccgctacctgcccaaagcatactgaagtcgaatcctttatattcaaatccagcggtgatgcctgcagtcaattgcgggtatataggattaccaatggggcactgatcattgtcgtcaattatattatctccattcaaatctttatatttggcgtccccaggctttaggtcgagcttatgatccggaagcttcccggattcaagatcagcttctgttacaaaaccgtcaaagataaaaccgaaaggttgtccaacggattgtcctgtttcatataaccaaggatacttgtgtggtatctcatccttatagacaattttattttttgcatatgagaggtttccattgatccagtatttaaagtctcctatggagtgattccatttcagaaccaactcgaatcctttgttatcaactttgccaatattaacaacaggcattgttatagctataaaattcggagctgtattgcgtgttgtaaggatatcgtgacgtttctcgatgaaataatcaaaagatccagataaatgctcatccaatattgaaaaatccaaaccgtagttttgctttcctgctttttcccaagagacaagaggattccccatttgtaactcggttgctccgtcacgatttccagaaacgtccactccgaaattataacttgttccataaggattgtaagcatcaggcaaatagaaaaagcgtgatttagtattcatcaggtcatttccgactattccatatgatcctctaatttttaagtagtttataaaagactgatttttcatgaacttttcttcagaaagaatccagccggcagaaaaagctggaaaaattccatatcgatgtcctggcgcaaaattttccgaaccattataacctacgttaaaatcaaccatataacgattgtcaaaattataggtagctcgtccgaccaaacctacatatccgcgaggaatactaacatagtcgaattgagctggatctggatattggtcacgccactgattatacaaaatcaaagcaccaacttgatgtttcccaaatttgcgatcatagttcaaactaccttccaaataccaatttcgcccacgatcagtagattcctcaaaatacaactggctttcttcacggaattttcggaagaataattcattggtttccggatctctatgcgcagtgtaataggggatttctttgtaacggtttttcctatgtgtatagccgctattataagaaccttttatattaagagatagccctttagtcaaaaaatccaacttttgttgcaaagaaaggtccaaattgatttcgttataaatacgttggttatatcctttcccgaaaaaacattcaaatggatcggcattttccaaggctcctttgtcccaaccgatgttatccggacttgtatgtatccatttaccatcataaagtccggctcctccgaacggagtgactcttgtcaagaatgtaaaaaggttgcttttagtattaggttctttagtatcttcaagacgacctcctaaattgatttttaatagagtggaacgtgtcacatcgatgtctagatttgcacgatagttatatctgttgtaagtaaaattagaattatatccagcatcgaaagatcgaaacagaccgtcttgtgtcaaaatacctacagaagtaaaataacgtacacggtcggttccacctgatatgctcaagttatgttgagactgaaaagatgttggttttaggataagttccatccagtccatatccggataaagtaaaggatctgtatgatttttgaaagcatccaagatcttctcgccaaatacaggactggctccatcgtttgtcagtttctcgttaaatgcaacagcgtagtcataactgttggcatattcataaagccggatcggcttttgcaaactggctgatgtcgatacagatatttgagctttaccttcttctcctcgtttcgtagttactaaaatgaccccatttgccccacgaacaccaaatacggctgttgcagaagcatccttcagcacggttatattttcaatttcgttgggatcaagacgaaaaaaagagcgctcgacaccatcgaccataactaatggtgcagctcttttagcatcaagggaacctataccacgtacgaatatagcaggatcatcagctccaggttgaccggaatattgaatagttgataatccaggaactttaccagtcaatgcttgtgcaatatttggaacaggtgatttcaaaatatctttagttccaacggaagatacagcccccgtgactgtaattttcttttgtgttccatacccaataatctggacttcgtccaacatttcggaattctcatttaaagtgatgttcagattgcgattatttttaatcaagacaatctgatcctcatatccaatatatgagaacttgattttgatagaagtagacggcacgtttaaagtaaagttcccattactgtctgtcatggttccgatggtagtcccttctacaataacattgactccggccattggttctcctgactggtctctgacatttcctttcacagaaattgtttgttgtgatacatgagacaaaccagttgtttgttttttaaatgaagttggcatgctcattctttccccagcctgtatattttgggctgtggccattccgattagaataagcataagacttcgtgatacaagtttttccatttatagatgttttatggtaaaattttatgacaaagtaacatgttttagacattatgagaagatgaaattttattcaaatgtgttcaaaatctattcatgatattccattatatggttaaaattcaagattcagctatttcagaaccataagtttaacattattgatagagatataaatatctaaaatccgtctatttttagaataactgtaataaatctcatccgctgtaaatgagatgatctccatttacagcgtacttatagtttaaacaaacggtttatgctaaagaactgatgaatattatacataaatattagtaagtctgaatgaaaagaaagcaatatctttttcctcctttagattgtttgaaaactttatttttcaatctttgaactgttaatttgtaacttgttcgttaaaaagaagatgtgccttagttttgacacatccccttgctttttcttttgttttcagtgatccgtctggaatctgaatgttatttataacatgactgattatcaaatcgattttgagtgttgccatttcaatccactgattccaccttgtgacagtttctgcattatacttgcggtctaatcgacaatcctgttatctttatatgacaagaagaaaatataagatattatttgaatagacgatataactttatagatgctaaagtcgttgtcgcaacagaagaggatattgttgtaactccaaaagcatatgacggcttttaacaaccatatgtaggtcataatacagtccggggattatgctttggtatcctaaaagaggtaaacgtaatccttaatttctgcttaatacttattttgtactttgactaacaaacttaattggaacttgaatcttcgcttaattggacaatttgacgatattctccggcaatccatacgctatcgttttcctcgaaaactgtttgggatgaaagattcattatcggtctcccgtcccgttcgatacccaagattagacatgcgttcttttcccgaatgccagactgttgaattgactgaccgatcaactgagatcccggttcaatattgaattgctctatttttatatttttattggtgctttgtgtcaaccgatctctatgttctttttcctgtttttgcattattccttggaagatatccaattcttcatctgttccaacaattatgatcttgtcaaaagggtaaaggcgttcctcaccttttggtatattgatttgttgttcacctcgaatgatagaaacgacgtttattccatattgttggcggaagttgacctctttcaaactccgaccgacaagggaagacgcttggtcaacagtgaaatcgatcaagtgcaaatcattgaaaggtaaagattccagaattttgtcggtcaaagggctttcaatgtttgatccatttgttttcccgttgaaattatcaataaatcttttttcgattgagagagaacgctttttcagttttttggataagataatcattgccaatatcaacagggtaacaataaatccgacaccggatgccacgtttaatatatgaactataaccggcattaggatacttgcgcaaaggagtatctttattgctatcagagaaaccaatggcccccggttatatttgctgtcattccataatttctgaaattcaggagaatgattctttttcataatgatggcccaaaggaaaggcaatataacagccagaataatagataagctcaataaagcccctttgattccagatatgttttcgcgaataatcggatttatataagtgaaaaataggatgatgctgaatattgtcaatactgtatatagtattacatccagtaacatagatttcaacaacttattccatgtacttttatgtttgacagtgttggacccggaagaatagcggttcaacattagttttacagatgaaggcaaatgattttcgatcaattgataggtcggaattgccaaacggatcatataaggagtaagaaatgttgtaacaaccgatacagcgacaataacaggatacagataatcgtccgttactttcaagctaactcccaatgaagcaataatgaacgcgaattcacctacttgagtcagggagaatcctgattgcagggctatcttcaaagattgtccggacaaaaggatgccaaggcttccgaaaaagacttgtccgacgattaccaatatggttaagatacagattgggataaggtattcgattaataagtccggttgtatcatcatacctacagagacaaaaaatatggcagcaaacagatcttttaccggttttaccagcttttctatcttttcggcctcaatagtctccgctaataatgatcccatgacgaaggctccaagtgcagaggagaatccagctttagtcgcaatcataaccatacccagacagaatcctaatgctatgatcaataaggtttcgtcgttaagaaacggtttgaccttttttagaaaacttggaataagatagattccgagtaatgaccaaaatataagaaatgctcctaactttagaatgcttttcaacatttccattccttccacttgctggctgactgctaaagtcgaaagcaagaccatcagaacaacggctactaaatcttcgacaactaaaacacccaatacaactccggtaaatttttgccctcgaagtcccatgtcatcaaatgccttgaatacaattgccgtggatgacatagaaagcataccccctaaaaatatgctgcttatatgtgagaagccaagtgcgtttcctgctgcatagcctagaaacatcattccggaaactatggttatagatgcaataacggctgtgcctcctacagtcatcaacttcttgaaagagaattctaaccccatggcaaataaaagaaatataacgcctatgtctgcccatatttttatattggcaggatcggatactgttggtatataaggtacggcaggtccggcaataataccggcaacaatataccccaaaacgacaggttgtttcaaccatttaaaaaccaatgtaattattcccgcagcaattaatataactgccaggtcggaaattagaggtgcaatttcagacatgttatttattattatgtgcttgcaaatttacatattaacttaaaactttgttggaacaaaataaaatactcttgttctaaaatcataatataacgtgagttcgaaacaagcataaatatcgtctgtttcaagcattattacaagtagtatgtctacaaacatctgaagcacttattgttacggaacgtttgctgggtacggagacttatgtcaagtagatggcaggtttcttggcagtctacccattccccccattttttcatcgtacattttgcagataggattaaaaaataataatgcaataaagatatatgtattatatttgtggcaatcagttaaacagtatttgaatgtatccaaatactgtttaactgattctatattagagaaaagtcgaaaaaatgagatatgatacagatatattgataataactaaaaaagaaaggattttttatgaaaatgatttttttatgggctatatttggggttgtcatgatcagttgtaattcttctcagaagaataatgccccaattaagaacagcgaaataaaaacagaaagccaagcccagacttctaatttatttggaacttatgagggaactcttcctgcagcagattgtgaaggcataaaaacgatattagttataaatgaagataaaacctataccttgaaaagcgaatacatagggaggaaagatgcaacatttgaaactagtggtatatatcatataataggggattcaataatggaattagtcactccttcttcaggagaaaagacctattatagaatgctaaataatagacaagtaatgctgtccgataaagaaggaaccattagtcaaagtcttttggctgagcattatattttaaataaaaaataacagcctattctctttgttattctctaaacaagacggaaagtaagacaagaactgcattggacaaatagaataaatgaaaagtgagaacaaatgccctgttgatatgctctctaatctcaagtgcaatcatttcatgggatgattgtacttgagacgggcgatttcaaatgtggtccgtttgtccttcagcctttgtcggatcgagaatttgcttcttatccctttcatttcttcggaaacggtctggtccaaaatcctcgtgtatattttgttgtcctgatgtctgtatgtccgagcattttcacaacggattccattgaaatcctgttggctagcgcgacggtggcgaatgtatgtctagccataaaatgatgttacaaaattaatttcgaactatgtaaaaaaagaaaaggtcttcaagactgaagaccttctttggtgatccgcctgggatccgaatcttatttataaatcactgattatcaatccaatttaaggtgttgtctttttaatcctccgattccaccttgtgacaatttccgcattatacttgggtctaaccaacaattctgttatctttgctggtaaagatacgaataaaaattgggaatattaaagattaatgtcacaaagaaatcggaaagaactgataatttttctttcagcagtcttgttgtctatcggtttgtattggttaaagaactttgatgagaatgttttccgatccaaaaggaaaagaagattgatccagaaaacaacctcaggagattcaatattcattgaacaactgatatcttattggaaactggcgcctatctattggttattcagtggtcaagccgttcatgtgacaatccgtctttttcaaatggaatgaaaataccaattttgacttttcggttacctctttcatagaatcccaaataaagcagacaaaggtcaaaactcaattttagcccagatgagcttttgatttgaaacttgaacatccttaaaggctaaaggaagaatcgtatcattactcaaaacagagcttgatacgactcttttaggttttgtagttacaatctgtaacttttcagagaggtcattttagtttttcacactcccatccacttcttttgtttactggaactatcggtatgatcgcagtgtacacattcaccatacacatctcagacggtacgaaaagtgcggcatgtccattgccggttgttattatggcatttgtctagcctgccaagcttctttgtatccattttgtaacatcctttctatatcgctctctttgtacaacactttacccccaagttggatgtagggtaacttaccctcattccgatattcctgcaaggttctgcggctgattttcaacctttcggaaagttcccgatcggaaagaaaacgctctccatttaacatcggacggtagtttcgggataaaccgtccagtctttctaccatgtgatcaagcgttcggaagaaagataggatgtcttcatcttccttcataatcagtttattcatacttgcttctcctttcttttttgaataaggggaagtatcccctgtatgtcttctaccctataataaatcttgtgaccgatccggctgtatgccaaggtcccattgtcacggaatgtttgcaaggtacggggacttacgccaagccgaaggcaggcatcctggctgtccatccacccccctattttccgttcaccgtgcattttgcagatctcatccgtaatccgtgccatatccttcaggcgctgtaacatccggtcaaatgtttgggcttcgatagcgacgatttccataagcgtattcaattgatttggagcaaatataaggagaacgcaaatcctgttccaagcgattgtcttcagatttcattaaatgtcatcagatgtcaaagcaagagaacgaaaggatatatcacgaatgtatttatcacataaaagaggataaataaaaaaacacacgaattggaaaccggtaataacggaaaggcacatacacgcaaaaggggaacacgatccgaaaacaaggaaaacgtaaacaatgcagattggagggaactgaagtcctatacgtctcatgaagttcggatatttttgacggcaaatttatctggcatcgttttatcatcatccgtttctttgcagaaatagtcctgcaaaaaacaaggggaagatatatatcgtttatgcgtcatgtcggtcacagttagtcctataatctatcatcaaatcaaagccgtttgtccgggcgtttatttccatgaatattttccccgactttagtcgcaaggaaaatattcatggaaagcgaagccggaatgcccgtgacaataaggctttgatttatttttgattatgggaataactccttgagaaaagcattatattacaaggcgcataaaaatgtatttccgatggatttccacacatttcttacccgatcctcacaacgtctggcaaacttcgattaactggtttgtatcccgtatttttctaaaattattctgttgagtttcttatattatccctttggtatattcttctacaaaagattttcccataacaagaaaaacttttgtagaagaatatacaataccaaatcatatagcaaaaattgctatccggtaaaaatcggcacaatcttatatccagcacaaatacaccaagcttcatcaattttgcaaaaagagggttgtcttttagtcttgtatgaaattggtagtaccaagcataaaaagcctttagcagacatttatactagtcaaattcatgttatatgggataaaaatcgtctagtttctatcatgctaaagttttaccggacagcaataatagcaaaatcctttctaggtgatggtacttatattcaaattaaagaaataccagaacatagttggcaggagaacatagagggaaacttcatatagatagcttgaattgtcaatgtaacacgggtaaatcagcctctttaatttgaaattctggcatgttagcaatttggctcaagaaacgatgtacgtgcgtcaagtcgactcctatcaattccactattattctattttcctcttctgatatataaagatcgttaatccctactttatagtactcaattctccccgtgtccatttcctcgataaatggttccaaaactattataagtgagtcatatttagcaatacttcggtaaatttttatcgaaaaattaaaagttaaacaatagaaccggcaaaagctagttcgaaaacactaaagaggtcattgaaatgttgtcaaaaacgaatggtttagcatgaagaaatgttctgaaaaaatgggctaacctgctgataataaagatgaaatttgttttgttgttcgttgatacttagcaaattagaagttggctactcatctaattaaggctaaagaaacactccttatgcaataccaatccgagtgcctgtcggctctcaaatcagtcgtgaatatacataaaccttttgaaaaaacgtttatggacaccatgaaattattcatggccatcctggatcgtataaacttcctccaattgggcaggtatggatgtttttcggaacagacataccgtaacctttttgagaatgaaactttcaactggtttgcgttcaacgcctctatcatcagcaagcatctcacaggcaaaagaaaagctatcgccatcgctccttcctatatccccaagtccggtcataagacaccttggattggttacttctggtcaggctgtgccggggattataagcgaggattggaaatcttgggcatcggtgtcattgacatcgacaaccatgaatgcatgactttaggttccattcagacgtcggattgtaagaccttggataatatgggtaagaacctggttgactggtatagcagctatcttatcagtaaaaaagacaagctacagagcatatccagaacggtggttgcagacgcattctttcataacgcctatgtgtgagagtgatttccatgtcatcagccgctttaggaatgatgtagtcctgtactatccgacattggaaaagaaaacaggaaaacttggtcatcccaagtggtttgacggcaggattgactttgccaattggatctgatctggtgcaaggaatacgaggtgaacaagggaaagctatacggattgagggtatatgcaaaggttctcaaaaggtatgtttccttggccgtctggtatccaatggacgggaggacaggcaagtggcagctttatttctctacagatgattagatggatggacgcgaaatcctagattattacagaaccaggttccaattggagttttgctttagagatgggaagcagcatgctggaattaccaactctcagtcaactgacttcagaaagttggattttcacttcaatgcatcgcttgctgctgtcaacttggccaaagcagcatgtaagaggctcggaatagctattccatatcctcttgcaagtcattcatacacaatgcttatatgcttgaacgatttatttgcatgtttggggttaacccagacatgtaagttattgacaaacttttcaaagaactcattttatttactgccagagccgcttaggcttggcgaatttttaacgaactattgatttagacaataaatgattatatgaatactcgcactcggtaatcaagaacaaattattaccgagtatttttcttatctcatctcgatatacggatgtatcccctacaatccctatgaccaattcatatgtggtattaacataagatcccgtataataatttggatatattgtcttacccaagctatccacgagaaacgaatccttatatttatccttatttgtattggcgatggtcgctttatctggcagatttttccagattccctcgtcggcattcttatgtagacaagaacacattgtactaatcagcgacaataacaggagtattttcatattgtttaatataatacaaccattattcactatatatttttttaaacttagagcctgtttgaatttatttgtttaaaataaatatatattcagagaaggtagaacaagagttagtacttcacaaaaaaaatttcgaaagagttgaatatatatgacttcgtatttactaatgtatttccttatttttatgctttagaagatcttgtttatttttaatccctttgagggaaactatttattaactaaatattcccaatcatataccctccctcttcttttttgcgcctttattaaatgagtgtcgatactcagatgtttttaattggagcaaatgaatcaaatagataattatatacaatcgtttctgaatggatctctgggggctgaagggcatactgttttgcgacagtggatcaaagaaaagccggagaacagatactatttccaagcccaggttgccatatggaaagcgaccggtgtgatatcgaatgcggaagaattcgatgtgacaggtgctatcaatcgatttaataagaaagcaaaacaggtaaatcgaatcgatttctatcgttgtacgttgaggttttcggttgtcgctatcattcttttaatatgcggaatttcttccttattctttttgtggcagtcggaagggagagtttcagaagttgtggaagaatatagggaatatgtggttgaggttccggacggagcaaaatctaaaattacatttccggatggttccattgtctggctgaatgctgggagtaaggtaaagtatgattcaaactttgccaaggcttcgagaaaagtggaactgacaggtgaaggttattttgaagtaagcaagaataaggaattaccatttgtggtgagtacggggaaattgtctgtaaaggtacttggtacaaaattcaatctaaaatcctatgaagaagactcagagttgaaagtaaccctcaaagagggcgcggtgaaagtcggagattttttgatcgatgccgctccggtcgagttgaaacccaatcagaggtttaccctcaggaaagcagacctgagcatgcaggtggattcagtggatgccagccatatagataactggcgcaatggagcaatgacctttgataaagttccgctggaagaaatagccaaagaactgaaacgtctttataacataccgatccggatagaaagtgataagctgaagcagatagtctactattctgattttcaggaaaatgtatcggtagagaaggtcctggagatattgtcatccggtaataaattccggtatgagataaaatcggaagagattcgaattttcaattaatataagtcaaactaaaaagaagatgtgaatgaggagaaagtaattgtaaccatgggtggaaaaattcataagccccaaaaaatgaagtgattaaaagttaaatcttaaacaagtgaagtatgaaaaaaaaatttagaaaatctgttcaggacttgctgtctgtaagggcaggacgtttggtgaacttagcaggtgtatttcttgttgccggaacgctttcgcttagtgcgagtacttatgcaactgaacatatgctttccttaaatcttaaaaatgccacgatccgtgaggctattgaatccatcaagagccaaagcgaattttcattcagtctggatgtgaaagacttgaatttggatgaaaaagtgtctgtatccctggataataagacaatcaatgaagtattggcggtattgttcaacggacgtaatgtccgatacgaaatcaatgatcgtcatgtggtgattacccgtgccggacaggtgggatcgaatgctgtgatgcagcaggttaagcaaattacaggccgtgtgctggatgccaataatgaaccgattatcggtgcgaatgtggtagttgaaggaacgacaatcggtacagtgacggatgcggatggtaattttgcgttggatgtgcctgatggagcgacattaaagatttcttatatcggttatatcgaacaaagtatctctgtggggaataaatctgttatatctgttatcctgaaagaagattcacaggcattggatgaggtggttgtggtcggtttcggtacacagaagaaattgaacttgactggtgcggtaacggctgtaaccggtgaagaaatgacgaaacgtccggttacgaatgcggcaaccatgttgcagggacaagttccgggtttgtgtgttaaccagggtttgggtgcaccgggtgctgaagcaaccactttccgtgtgcgtggccagggtactttctcggatgccggttccgatccgctagtattggtaaatggtgttccgggcagtatttctaacctggacccgagtatgattgaaagtgtttcagtattgaaggatgctgcttcagccgctatctatggtgcgcgtgctgccaatggtgtgatcctagttacaacgaaacaaggggcagaaggggatggcaaagcgcatattgcttatcatggtaatgtggcgatttataatccgacccgtatgtatgatttggtgactaattctgccgaatatatggaactgtataatcttgccaaagcgaattccggtgctggagagcgttatacgcaggaacagatcaatgcttaccggaatggtggtggtagcgtacagtatcctaattttgactggttggattatatgtttaatccggctgttgtccaaaaccataatttgtcgatcgccggtaatgcaggaaggactacgtataatgtggctttgaattttgtagaccagccgggtacgttgaaaggtttcgattaccaaaagtacaatgcaactgtcgatttgacttcacaaattacggattttatcaagatcggtacctacaccaatttgatgtatggtgatcgggatgaacctcgtcagggacaaagtgacgttttactttcgacgatgtcgcaagctccgacttatatgccttggttgccggacgatgggtcaggagttacccgttggacaaattctgcttattcattcgaatctcacaataagaatatgccggctatcataggtacgggtacgaataagaattatcaggatttcgatataaatgcgcaattgtggttggatattaaattggccaaaggactgagctggtacacgaaaggtgccgttcgtttgcaatctaacaaatggaaggaatggggaggttctgatgtccctatttatgactatcatacaggtgaacaaacaggttatctggatagaggagcaaacggcttgacggtagaagaccagcggcgtttttatacaaatttgtatacctatctgaaatatgatttcacaactccgaacctgtatcataatttcaatatcatggctggttatagccaggagtctgaaaagtatgaaacggtaagagctttcagaaaagagtatgcgttcgatctgccggtgattgatgcgggatctaatgcgaactggtctaatgaaggtaaattggaagaatgggctattcagtctgtttttgcccgtttgaactataattttaaagaacgttatttgtttgaagcaaatatgcgttatgacggtacgtcccgtatttcttcagaaaatcgttggggtatcttcccatcattttctgccggttggcgtattaccgaagaagattttataaaagatttgaatctgaattggttgaataatgccaagatccgtgcttcttggggacagttgggtaaccagaacattggtctgtatccttatcaggcaatgattgccggtgtttctaactatccgtttgataagaaaacagaaacggtaggttatcagcagaaagcatatgcaaaccgtgatatcaaatgggaaactacgactataactgatgttggtttcgatttgcaggtgtttaatggactgaatgtaacatttgactggtataagaaggtgacttcagacattttacgtaaatctcaggtttcaaacattttaggtttggaagctccgactgttaatagcggagaagttgaaaacaaaggttttgaaattgctttcaattataataacatgattacagacggtgtcttcaaaggtttgcaatacaatgccggtgtttattttgaccgttcaaggaacaaattgactaagtttggtgcggaagaaatagatggatataaactgagaagagaaggacttccttataatgaatactatatgctggagtgcatcggtatttttgcaacggaagatgaagtaaaaaattcaccgaaacagtttaatgacaacacattgcctggcgacttgaaatataaggatcaggataataacggcgtgattgacaacaatgaccgtgtacctatttcaggacgtttccccggatttgaatattccgtcaatctaggagcaaactggaaaggcttcgacctgtctttgcagggacaaggtgtttcgggtaagaaatggtatacaaacgagtggggaatttatccgttccgtcagggatctgctccgacacgtgaatatatagaaggcatgtggacggaagaaaatccgtataatgctgaacatccgcgtctgtattttgataatttgggcggtaataagaataccagaccaaacacttatatgttgcagaatgcttcttatttccgtttgaagaatttgacgttcggttatactttgcctaaatctgttacggataaagtaaagatgtcgagagtaagagtttatttctcaggggataacttattgacgtttacgaaattctatgggttggatccggagcgtgaaggtgatggacgtgctgctgtttatccacagaatagaatttgttcatttggtttgaatgttgaattttaaaagtagaatgcaatgaaaaaaatagtaaatattatattggcttcggctttgttagtgagttctactacttcttgtagtgattttttacagaaagatcccccttcttcaccttcacagtctattttttggcagaaaaagagtgattttcaatctgcattggcaggaagtttttctatggtatatgaatggccgggagtcatgtcgcaaattgtggcttgttttgataatcttactgacaactccatttgccagcatgacgaggatacatacggaaagactaagacgattgctttaggtgatttagatccgaatacttccgggtatgtgacttacatgtataagcattgttaccaaggtatagctcgtgttcatttattgatggaaaatttggaagcttatcaaggaactgatatgtctgctgatgagaaatcttttatgcttgcgcaagcgaaagcattgagaggatatttttattcctggttgtaccagtgttatcgggaagttcctttggttacagagtctttgacaatggataacatgtatcaggcaaaagcttcacgtgctgatatttatgctcagataatgaatgattttgacggagccatagctgctttgccggataaaccttattctgatgcccaaatgtccggatatttctctccgggtgctttgaaagcacttaaggctcgtctcatgttggctgaagcctacgatgataaaggaaatgcagatccttctaaaatgggggatattgtttctttgttggaatcaatcaatgggtatagtttggcggatcggatgcgtgataactttatatcttccaagcagctggcttctcctgagattatgttctccgttcgttatttggcaccgaatataacccatagtatggacttgtattatgcagcatggactacttgcggtgtgactcgtgatttagtagatgcatttgagtgtacagatggtctgaaatggggtgaatctccgttgactgtcccagtcgatgaatctttactggctaccggagaattaggagatgctaataaagctgaaaggactaaattgttccaaaatcgcgatcgtcgtttgtatgaaacggtttgccatagtggtgtagctgatttctcgatagatggacaagatggagagccggtaacaattaccaatcagatgcaaacaggatttggaatgatgaagttgattcagccgacaaaagaaatgccgagttattcgactatatctgatgcggatgtaattattttacgttatgccgaggtgttgatgatgattgctgaagcagaaaatgaagtaaacggaccgactcagaaagtatatgatgcggttaatcagatccgtgttcgttccggtcaacctgagttacctaccggtttgactaaagagcagatgcgtgaacgcattcgtaatgaatggcgtgtagaatttgtatttgaaggccatcgttactttcaactaaaacgttggaaattaatggaaaaattagtgaatggtgcagctgatcctgcactacccacttatataaaggtctttaagcctgcattctattatttcccattgccacagagtgaaattgataaagctggtggtgttctggttcaagatccgaattatatttaataatgtagtttaaaaaaaggaataccagggaggtttttttagttgattttcctggtattttctttgataattaaagttttagccattaaaaagaaatgactaaaaaaaacgttccttttttttagtcatttttattttctcggagttgttattttttttggcttagaaaaggatttatctttcacatttttagtacttttagtggcaatatctatttgaatgaacaagactgaaaaaatgactaaaaaaaaggaacgttttttctagtcatttttatttggcaaatggtattgaggcttaattaacaaactgaaatacatatatatatgcattaataagggaatgcatttaatcagggagaatggctgtcgttggtgagattttagacttgaagaagggaaatcataaaacttttgagcttttattcaaaaagtactatgtttttctttgttatgaggcacgttcttacatcacggaaaaatatataatagaggaggttgtcggtgatgtatttcgctggttatgggaaaacagagagacattggttattacttccgtcagggcttatttagtcagggctgttcataatgcgtgcttgtcataccttaggcaaaatcaacctgaatatgtggagttggatgatactgttgtagaaaggagtactttgttttctctggatgaatctcccctcgattacgttctttctagggagttgatagagcgggttgataaagcagtgaaagaactaccttcccagtataaaagggtttttgaactgagccgatataaaaatttgacctatgccgagatttcggaagaaatgggtatttctattaatactgtaaaactgtatcagaagaaggcgttagcgcaacttcgtttggttctaaaagaatacttatcgacttctttggattaatctgatttgaacagttttatagatctatatttgaaaatatatatatttatttcgtttataaacttttttatggacgaaaagatgctgatttgcaaaaagtaaacaaaactttgttgtgataaaagataatcggtttatcagttgtctttatgttaatgtaacaacaataataaatatttatgaaaaagatttttatacttattgtttcgttgggattgttgtatcctgaccgaccgtttgcacagaacagtattaagctgtatccctatcaaatgcccccgtcccatcatcccgattatcaacgtcatcatgtgaaatcgccggatgcctctttctttaataacaaaattcagtttatagcccttcgtgatctctccggagattacaagcaaaagctcgatcaatgggtggtgaaagataaactaggggatatcctgtgggtttcctatccgctggtttttcaggataatctgaaagaggtcgttgccgagataaagagaagaaacctgtatctgttcgacctttggggatatattcccggttctggtcctggtgggtactggacccagttcgttatcccggacggcgtactcgatcttttcgagaaagaactgggcgaccattggctgggcatggataacggtgaacaggatgggcgttatgtcggtagttttgctccccgtatgtatcctttaggggcagatcgcaaacaacaatattttaatttccagcgtcattttcaggaaatgggcgatcagttgggaaacaaaatggcgacgcttgtttctctgaacttcggacattattttctgaaagaaggcgtttataccctgatcggagctgaaacggcgcagggtttgcctaactcacagatctattattcatttatccgtggagccgggaaacagtatggtgtaaactggttcggaaatgcttccgtatggaatcgttggggatggaaatcgtacgattcgaatgcggaaggtatcgataatgattacaatagcggaggtccgctgaagggaacctctctcggattgctgaaacggttgatctatactcatttgatgtacgattgtgtggctgtcggttttgaagggtccatgcggatagatgataagaagctgagtcccatcggaaagatacagcagagtgcggttaaatgggtagataaatacggtgatccgggtgtgatgtacacaccggtagcattgatgaccgatttcttttccggctggtctttcccgcgtcatctatattccagacaggcttataaagtatgggggaatctgccgtatgagttgccggattatctgacggacggaatgcttgatgttttgtatccgggttatcaggatgcttcctattataaagatgaaagagggtttatcactccgaacccttacggagatattgctgactgtctgatgagtgatgccccgctgtgggtattgaaacaatatccggtattggtcattgccgatgaactgcatccggggcaggagattaatgataaactgaatgcctatatacacgctggtggtcatctggtcattacggctggttcattgaagaacatgccggatggaatagccggtatccgtaccggagaaaagacaaaggtatgtactgcaccgattacatataaaggtgagtcattcaaggagcgtgctccttacacattagccgaattaatctatccggcttccgctactgtattgcaaaaaagtaatgaatttccggctgccatcgaattgaatgcaggcaaagggaaagtgacagttctcgcttctccgtatggcgttacagagcaaccgcaatgtgaattgcctgtaaaggtgatggaagaaaagccgttggataaaccttatccaatactgaaccatacgaaagcactgatggaagatatttttacttctgtgcaactgtttgaaaccaatccggagttaagtcttgtgacctgtacgagaggaaacggcgaatatacggttctgatctccaatgagtcttgggaaccgaaagagttttcgatcggaacaaaggcgggaaaaatagtttatatcaaagaattaccgaccgattgctcggagatgcaggcagtaggctatgcacctaaggtgatgctgaacacatcgtttggtaaaaacacagcccatacgatagctggtggaaatgtccgtattttccgcgtctgcctggataataaggcagacgtgacagttatgccggaaagtactccagtagcgaatacgatcggacgggcgcttgtactgcgtaatatccaggatgtaaaggaagaaatcctttcacgcccgacattcttcgaacattatgaccgtgtcgtgatcgactggcgttatctgcataaccgggaaaaagagactttgaaacaggaggccggctggctgggacggcagaaactgaaaatgacggtcgacctgacttcggggctgaacctgtatccggatttgagaattgtaaataatgatcctcctttctatcagaagagtatggaggcgatgaaaggagttatcgataagatggaaatactaggtgctgacgaattgttgatttctacccagcggaccatcgaaaataattatacgatggaacagttttatgcttcgctgaaagaatccttccaggtattatctgattatgcggcaaagaaaaatatccgtttgttgctgagacagtctgtcggccgtacgcctgatacgatagaggggcttcagaaactggtcggggaggtgaaccgcccgaactttacattagctccggccctgtcgttgctgttgaataacgaggtcagtctggatgccgatttgaatcgtctgaagcagatggagatcaaagaaatcctcatttctgcaccggaaaaggatattcatgatcaattgtggaataccaatgctccgatatataaatccgataaagcaacacttatccgtaaaatactggctgcattcccgcaggtggattatatcatggatggtctgtatgcttcgcaggatgaagagtatctggatgggaaagcgatggacgaatttgttattaaataaacatctatgtggaagaagttattgattacaggatgtgtgaccttcagtttgttgagtggaggtacattatccgcacaacccagttgtgagataaaggaggaagttacctctgaacagcttgacaggacccaaaaggaactggttgctatgatgaaagagttaaagaacgactcttattttcagaccgaactggacaaggctgctgttcagtcgagtctatccaaacggatggcagcatataaagatctgacagtccgcttactgtctgttttggagatacaggctgaactggaatggatgaagccggaagctattcaggaggctttaggtatcatgaaaaaaagttctggatttgatgcagtattggcggataaacgtttcggtgaattgaagtcgttgctggctggtggttttgatggtatttataccggagatgctcaggctatcgacaaggcaaataaaacattgactttaaaacgaaagttgatgctgatgagtccggatgtgaatgtcgacaaaatgttgacggttaagttcgatctgggcgaaagagctaatttcgttggagcgggcagtctggggattcagccgaacaactggtcgaacctaagttctgccagccgtaagaactttaaggctcaactggttgaattgtcgggcttgcaaagtggcgaattgagcgagaaagtactttataaaccggctgtggacggttcttccgttaccgacttggtattgaactgggacggaaaacgtttgatgtttaccgctttggatacgacaaggagatggcaggtacatgaattggatatcaacaacggagaggctaagcaggttaccaatatcccggaaccggatctggagttcttcgatggaacctatctgcctgacggacgtatgctggcgatctccaatatcggttatcaaggcgtaccttgtgtaaacggtagtgatgcggttggtaatatggttctgtatgaccccagtaacggttacctgcgccgtctgactttcgatcaggatgcgaattggcatccggtagtgatggcaaacggaaaagtaatgtatgtccgttgggagtataccgacctgacacattatttctctcgtatcgtgatgcacatgaatccggacggaaccgaacagaagtcgctgtatggtagcggttccatgtttccgaacagtattttcgatgtgcagccgttaccgaagcataccaaccgtttcgtcggagttatctccggtcatcatggagtggcccgttccggtcgtctgatgatttttgatccggcaaagagccgtaaggaagaaaaaggaatgattcaggaattgcctttccgtggtcgtccgatcattccggaagtaaaagatgaactggtgaacggcgtatggccgcagtttattaaaccgtatccgctgacggacgaaactttcttggtaacagccaaactgtctccgtacagtcgttggggaatttacctggtggatatttatgataacctaacattggttgctaatgccgacgatgccggtatgatctattctgttccggtgaaaagtactcctatacctccggcaatcccagatcgtatcaaaccgaatgaaaaggaagcgactgtctttatccaggatgtctatgaaggcgaaggcttaagaggcgttccgcgtggagagatcaagtcgttccgtgtgtatgcatacgagtatgcgtatcgccggacattatccgatcattataaccacggtatccaggcaggatgggatatcaagcgtttgctgggtacagttcctgtggagaaagacggctctgctatctttaagattccagccaatacacctgtttctttgcaaccgttggataaaaacggacgtgccgtacaatggatgcgtagctggctgaccggtatgccgggcgaagtcgtttcgtgtgtcggttgccatgaagaccagaataccattcctgttccgaaacgcgtgcaggcttctacccgtcaacctcatgaattgaaaatagcggaaggcggcgttcgcccttatactttcgcttatgagattcaacccattcttgatcgtgcttgtgtggcttgccacgatggaagcaaaccggaacgtccgaacttcaaggatacgacatccgtaggtattaccgactggagcggtacacgttatttccagaagagttatctggctttccatccgtatgtgaaccgccaagggccggaagcggatatgtatgtcatgagcccgtatgagtaccatgcttctaccagtgagattgttcgtatgttggaacgtggacatcataatgtgaagctgaccgacaacgaatgggagcatctggttatgtggattgatatgaatgcaccgggccgtggtacattcgatgcagatctgttgaatggttacgaccaatatacacgtcgtaaggagctggctgataaatatggcaatgccggtgtggattggcgtaaagagttggccgattatgcttcttatctgaaaggtaaaggagaaatctgtccggcaatgccggaaaaggtgacttcggcaaaacataaagcggtaaagatgaaaagatggccgttgacggctgaagatattcagaatctgttatcaaaggaaacaggacttcggaaagatgtggaagtggctgatggtgtaaagatcactttcgtacgtgtaccggcaggcaagtttgtaatgggaacgaatgatgcttatccggatcaagcccctgcattcaaggccgaagtaaaaaagggtttctggatgtcggaaaaagagttgaccaacgaacagtataatgcgttggttccggagcatgacagtcgtatctatgcacagttctggaaggatcatacaactcccggttatccggccaataaaccgaaccagccggttatccgtgtcagctatgaagaagctatgaagtattgcgatatactttcggaaaagaccggattgaaggtgacgcttccgacagaagtgcagtgggagtgggcctgtcgtggtggtagcgaccagccgttttggtatggtgcgatggatgccaactttggctcgtatgaaaacctagcggatgtccagttggaaaaaatggcggtaacaggtatcgatccgcagccgatggcaaaggataatccctggttcccgtattacaattatctgccgaaagttgagacggtcaatgacggtatgatgataccgtccgatggatataactacaggccgaacccgttcgggctgatcaacatgcatggtaacctgcaggaatggactcgttcactgtatgctccttatccttacagtgaaaaagcccaggcgacagctgatacccgtcaggtcgtggcccgtggcggttcatggatagaccgtccgaaagatgctacagcaactgcccgccgtgtttatctgccctggcagcgtgtcaataatgtggggcttcgcctgatcattgaggattgacttgggtgaaatatgtatcataaaatatgtaattggaaactctaaaagaatgaagtgtttgattaaacatattgtcttattgtcaattattggatttctattagcttgtactcaacaatttcgctctgattcttgaaatcggatacttttaagcgggaattgtggggtacagttggatacagcagcaacagggattatttctggttggttgtcccgattctttattcctgccatgtactaccggttatgaaagaaagggtatttataatacagatacggtcagactacagctctttctaaagagtatgtgtttgaagaaatagcactgtacacaagactgtatgtataccggaggagtggagaggtacatgtatccgtttgataatggaacggactaagccaacgaccgtttggattgatgggaaagaggttggaactaatagtaatatttctacagcccaacaatatgagttgtcttcttatttatctcccggatctcatgatattgctattatagtggataatgggaaacaggctgttccggaaaaagtgtatggatcttctcatgcctattccagttccacacagacaaactggaatgggattattggtgacttttttcataaaatacattctttttcaagccgatatctcataacaagtcaatcttgcaggatatcggctttttatattcggtcacggaacaaatctacgatcaaacggatttcctatgttcttttcggcattcagtcggaaactgtacttttgtctaccggatctttttggggctttctacccgtccttatccctgttgttttctccatacacatgagatttttggtttgtactttttcttctagaatccgcgactttggagcggattctcccgcccttggggcgggcaagttggtccttgtccgacaaaagaattttttcggacaaggacaaaactttctctgttcgcttgaacagagaatcctcataaattcggattgccatgcaacgtttacacaaaaagaggttttttctgatcaaattttgtttcaatacccgcttttaaagagaagtataaccgcttggttatctgttagtatccggacatctggtgacatctgatgacatctgatgtcaccaaagccggatttggcggcatctgccatacttttgcaacgggatataaaaacggtgtcatgcccggtcaccggaatatccccatgtcgacgctccgacagttcctgctattgacattccatcatgatgttatgtcaatatgtcaagaggaaaatggaagatcgtattgcaagtatgagagtttctcatgacaagctccggaaatgtcgggaccccgtgaaaatggtacggtaccggcagacagccttcctgcattcttccggcacggctttggaccggcggggcgggaatgttttcgagatgacatgacagtttcatgatatgggaaaccatcggtacaaggagccggcgtgattaaaaaaggacgggacaacaaaacgattattaaccaatcattcggaagcctatgagcaaacgatgtgtctttgtcgccatgagcagtcagaaaggcggcgtgggcaagtccaccatgacggtgcttcttgccggttattttcattacgtaatgggatataatgtcgcggtcgtggactgtgactatccccagttcagtatcaaggcgctgcgcagtcgggatacccaaaatgtggaaaagaacgtgaatctccagcgtatgttgtgcggacagttcgaccggacgggcaaaaaggcgtatcctgtccttaccagcgttccgggcaaggaactgaagacggcacttcccttgacaggtgggtgtgacattctcttttttgatcttccgggaacggtgaactcgcctggagtcattaagacgattgtcaatatggactatgtgttcaccccgatcatacaggaccgtatggtgatgcaaagcagcctttccttcttattggccctgaaagacttcatacagcagaatccggacatgcccttgaaggaaatccgtatgttctggaaccggatggacgggcgtgtatccaaaaggctgtcctatcagtacggacttcttttcaaggaactgggattgaaggctctcgatacggtcataccggatatggagcgctatggcagggaaacctcccccgaggagcggatccttttcagaagtacgcttttccctccttccgggaaattgctgaaaggcagcggtcttgatacgctggccggagagatagaatgcattatccatcctgacaggcaaaaggcatgagaagaaaggaatttatgaacgtgaatgaggaacgcctgaaagagatcatggcgcacgagaccgatgccgacggatgtccgaagacgcatccggacgggatagagaaagaggaagacaggggaaaggaagggaaggagtctgtatccatacccgatggcaggacagaaaagccgaccgttttccacaagcccgctgtccggtcagggacctcccttgcggaaaggatgaagacatatcgtgccgactatctcagccgcagggagtacgtccaccgcaagcagacctatatcagttatgagacctaccgcagactggcacgcatactccccctgctcagcgagggcatgaccgtaccggcattccttgacaatgtgctcaaccgtcatctggacgagcatggggatgtgcttgacgagatggtccgtaccggtacacggaactcacgctgacacgtggaacgatgggaatgacagacgaaaagacatgggaacctgttcgtcccgccaatggagtgtgacaaaaagaaaggggcgtccagcgggtctatacccggtcagacactccttggtgtatatttattttatgtacagcctatcttaaaatcggattcgagagcagtatcttgtaatagaccgttccgttcacctccatgggtgtcttcgccatcatgaactgtacgcttttccgctccaccttcgcctgccgcatgagcctgtgcacgataaaccccgcagagaatcttgcacatcttttgtccttccatacgatgaacccgtcatcatcggtggtacggcagatgtaccagtcccccgtctcgtcatcatgcgcaaagcttacccggcctccgccaagaacacccagttcaattgacatcatctttgatagatagacagttcccctgctgtccagattgatggtccgcttgcccttgtatgtgacttcctgcggacgggaattctccttgttatatacgataagtgccatagtcctttccttttataatggtgataaatgacttccgttcaggatatcgctccttcaattaccagcatctggctcctccacgcaaaactcctatgcgagcgcaccgcttccactatggcgcatactttctgtgatattgccatagctgagatgcccatgcattccgccagtgccttgaaagagaaactggcctcgtagaaccggagcatgaacatccggtattcgtcataagagaatttctgccggataaagcggagtatgtcccttaccagcctctcacatccgttcaggtcgtccgtggaaagaaactccgcctcctcaccgcatctgaggaaaaaatcgtcttcaggatgggcataccggttctctctttttatctttaccagagccgcttttttgtagcatccgacaaaatacgcgtcataatccgttatgtcctttccggggactagcacctgcttccttacgaaaaggtaggtgtcatggaaattgtcctcgtccagcattccgtaccggcgtaacgtccctctcagtctgtcataggatttagtgaaccattcgttgaacagtctttctttttctgtgctcttgtctgccatagccttatatttttttgagttatacatggcctacacgggtaggcattcttatttcttgtgcttcctccagtttgtttttcggcggtctccggcaaggcttgccgtgaaaaaatacgctcacgcaaagcgtgaggaagattttttcacgagcaaccagcccgcagggccgccttgcgggaccgacctgaaaaacaactttctttgccgcaagaaatgaggatgacagattgcgttacatttattcgtaaaagcttttgttatttccacctcatgatgtattttcgtgagtgcttattacattttagaaagcagacgggaaatggaagaatattcgaaatatccggtagaggtaatcagtggcatcgccgaagaaacgggcatgggaatggtctgtttcttgaatccggacactttggaaaccgaaagcgtgccgggagcttcatacggttcttatgagtgtggagattttgacaaatattatcaggaagtttacaggaaggtggagcgttgggagaactgcgtccgcattgacccgccggagccgggagagtccttcgggatcatggagcgtttcattcgggattgcataccggatgatgccggaataaaagagaggttgcggaaagccgtatcgggacggaagccattcagaaatttcaaatatgtcattgatggaagcgaataccgtcagaaatggtttgatttcagacgaggacaactcgagcggcttgtagcggattacctgaatagcctggatatagatgcgtctgccaaataaaaatcatttttagactttttctcatatttttatatacaaggatttgaatatgagaatctgagcagaacggagaaactggatggtttccaaattgtatatacaaaatgtcgaatctcacagatttgcataactatctgtcaaatagtatttcttccatattcttcccattcaaatcctgttcattacggagtaaggatatgttgtggtatttctttgtgagttttggatatattgactcaatatatctgataaggcgcttctcttccaatgttccaaaactatcctcgtaagagtgccaatcggcttttgagaggtccatacacagatacatattctctgtttccaacatagacttaccaattctttaactgttaagtaataatttttgtgtacgttcacagagacttcttgtatctgtttcggacggaaaagctttgttccttatccgataccgccttttgacaacaatggttctatctgatggagaacctatattgcacaaaaaagtttctctttctgcgtcagatcatccaacacttcttgtttggcatataccagaatattgattcccgctaaatatgagtaacccttgataaagttcttaatagactccaaattggaataagaatctttaagatttgagaacttaaaagtatcaaaacggttaatcacagcacgaatgacatgattaccaaattttccaaacataaatgcaggataaggaacagagatggtatttgatgaagtctcggattcaaatgctaaaccgatactcatatcttgttgatatgccacctaatctcaagtgaaatcattttatgggatagtttcatttggaatcaggtggcttcaagtatggtctgattgttttccagtccttatcagaccacgaatttgcttctcatccctttcatttcttcggaaacggtcttgtccaaaaccctcgcgtatattttggttgtcctgatgtctgtatgcccgagcattttcgcaacggattccattgaaaccctgttggccagcgcgacggtcgcgaatgtatgcctggccacatgcgtgctcagtggtttattgataccgcatatgtcagcgatctctttcaaataactgttcatccgctggttactgggtaccggcaagaccactccttttttcaggcattccggatgtgtcttgtacttctccaaaatcatccgtggaatgtccaacagtggaatgtcacacatgttgtccgtcttttcccgggcttttcttatccagtactcgccattgacatcctttattatgtgttcatatcgcaagtgctgtacatcggtaaaggccagcccggtcagcgcacaaaacacgaatatgtccctgaccgtttgcaggcggggaatggtgaattcctttttcagaagtatgttcaattcctcttccgtaaggaacgcccggttcgtttttgtttgtttaaaatgaatctccagaaaaggatcgtccgttatccatttgttcacaagcgccacttttattatcttcttgaagtttttcagatattttaccgtggcattctgggcacatgatttttctgtttttacatagtgctcaaaccgggcgatgaactcatggtttatctctttcaaaggtatatcgttcatcctgtattccttttgtagcagttcacccagatacctcgcggtccgttcatagcgcaggacagtcccggcgacataatccttgcccatcaactccctgtactttcggttatgttcctggaaaacctccagcagcatcttcggagagtctctctccccgtaataacgtctttttaagacatcggccgtgatcggcttcccgtcctgctccagttccctgtggatctgtaaaactttcatacggaccgtatccagataatggttcaattccatagatttcctttccttacctatggcacattccttttgggaattccacttggaaatgtccacgcttcttttaatctgtatctcggcccgttgcccgttaaccgttatacgcatacaaatgggtgcctctccgttttttaggagtttagacttcttgatgaagaaaagaatcgtaaagtagtttctctgcatagccatactcaaaaaaatgatgttacaaaattaatttttacgagtcggtttcgaaccgcgcaaaaatcggaaaatcaatgaaatatgatctaattcggtggactttttcaggtagatgtcaagtccacctatttcacctgtgatcatcactgttttttgcggtgaaatgcagtatttggagaaaataaaaatccctgataatgtctgattatcagggatttgcttggtttttcttttgttttcagtgatccgcctggggttcgaacccaggaccccatccttaaaagggatgtgctctacctgctgagctagcgaatcatcctgtgcgttacttctgtaatgcgggtgcaaaggtagggcttttttttatatatgcaatagctgatgcaagtttttttattcttttgggaatgtttttttcttttggacctttgacaactcgtgcttctctacaagagactggtcttcttccataagtataaaacgtttataataagagagaaagagagttgtcagggggagagcgatgattaagccgataaaacctaataaagttccccaaatggataaagaaagaaggatgatggccggattcagtcccatagcctttcccataatgcggggagtgagatacaaatcttgtatgcactgcacgatgcaaaggacgagaattcccgatccgaagatcagccaaaagttttctccggtctccgcagctttgaggagactcagcaagatcatcgggatgataccgatcgtttgcatataaggaatgaggttgaggaaaccgatgaatagccctaggataacggccagcgggaaaccgacgatcttaaatccgatggcgaagaggatgccgacacataaggcaatcaatgactgtccgcggaagtagcggttcatactatattcgacatcgtcggctagcccttggacaaaggggcggtaacgttcgggaatcaggcggatccaaccgttgacaatccgttcataatccaacaggataaagatgaagtaaaggaagattacaaacacgatcgtaatactgaacagaatggagaaagtattggtcagtacgatccacattttgggagcgatctgtttgaccgccttttctatgttctctttgctcaggagctgtgccaactggtccggatcgatattcttttccagatactctgcccatgactgcggaatcattgggatatgtccgtagccgctgttatgttcctgcatcagttccaaagtccggttgaactcctgggtgacagaggggacgatcacgacacccaccagtgagatcaccagaagggtagacacgagaacggccaggatagacagcaaacggcttttcagcttgattttatactggaagaacttgacgaacggctgcatcatataagccagcagccaggcaatcaggaatggtaacaaagcatttcgcaggacggcgatcaggtagatgataccactgataacagccaggccgaacagaatacgtgccaccctgtcgaatgtgaacggtttatcaaacaatgggttcatattaaattcttatctttgcaggcaaagataatgcaaaccgacttatcttcgcctttatggcaaagataaaataaagttgaatagaaaggatgatacgaaacaaaatagtactgctttgcctgttgatttgccttcatttgcttgccggtgcacagactcccgcccccgtcaaatggttattgcaggccccttatatgcggggagcctctttttctctggtagtgaaagatgtgcaggagggaagaacggtctacagttatgatacggaccggctgcaatcgcccgcttcggtgttgaagacggtagccacggcgacagcgcttgagatattgggagaagactatcgctatccgaccacgttggaatatgacggaatactggaaaacggcacgttggagggaaacctctatataaaaggaagcggtgatccctccttgggctcttcgcatttcgcaccggggcagaacaagtttttgtcaacctggatagctgctttgcagaaagccggcatcaagcatataacaggatcggtcatatcggacgaaagcattttcgacaccgaaggcgtctctattaaatggctccgggaagatatgggaaattattatgcccccggaagttatggtatttccatcttcgacaatatgtataagctatccttgcagactggggctgccgggacgcggccggtcctaaaggggacagagccggatatcccttttatccggtttaagaactacctgaaagccgctccggtttcttcggacagcgcttatattatcggtgctccgctcgatgacgtgcgctacctgtatggtgtcctgcctgcgaaccgggaggcgtatgtcttgaaaggagatatccccgatcctgccttatatttggcacgctatctgacggaccagcttcagcagaagggaatacgggtggacgggtccccttcctgctaccgtatcgaggtggaggaaaaccggtggaagaagggagagaggaaagagattgtcacgacctattcgcccacgctgcgggagatagcaagcgtatgcaaccatgtcagccataacctatatgcggatgctttggtcaaaacggtcggattgcaatacaaaccgcgaaggaacgagatgatctcctcgtttggtcgtggtgtgcaggtcgtgaaagaatattgggagaagaaaggtttggatgtctttccgctccggatgaacgacggcagcggcttggctccggcagataaggtgtcggccggatttatgggagagctgttggtctatatggcgacggaatctgctgtttcggatgctttcatagcctctttaccacaagccgggatagagggatcagtgcgcaatttcttgaaaggatcgaagttgcagggaaaagcccacctgaaaagcgggggcattacgggtgtcaggagctatgccggctatatcacgaaagatggaaagacgtatgcggtagccgttttctcgaataactattcttgcccgatgagccggatgactagggctttagaaaagttgctgttacaacttttttaattaattgagaattgggctacgccgtatcatcttataattgttaattgtccactgtcaattgaaattgagtgaccgttgcgccagaaattcgacaagcctcggtttgtagttgtcggagatcgggatatattcttttccgaacacgatccggttccgttcgatcaccttgatcttttcaggctgtacgataaaggaacggtgtacacggataaagcggcttgccggcagcatctcttccagcgacttcatgctcatcagtgaaaggatgggatgcggttcatcctcgataaaaattttgacatagtctttcagcccttcgatatagagtattttgcgcagttcgacctgtacctgcttatactcagtcttgatgaagatcgactcgatctctgccgcaggcgcttgcatatgctcgtaccattgcaacgccttgttggccgccttgaggaaatccgggtaactgatcggtttcagcagatagtcgagggcgttcaccttgtagctgtcgagggcatactgttcgaaagccgtcgtaaagatgatgcgggtatctgcctccagtatccgagaaaattccatgccgctcaactccggcatctggatatcgaggaaaagcagctctaccggctgggcgctcaatacgggcaatgcctcaagggcgctgttgaactttgctgtgaggcggaggaacggagtcttgtccacatagctttccagcagactgatggccagtggttcgtcatcgatgattgcacatgttaacgtcataatttgttgtattgatgtaccggacaaaaatataataaatccttatgcctgcaattctaacaggcaaacatattcgtctcctttttgcccgtacgtgaaaatatgatgcgacggatacagcaattccaaccgcctgctgagattctgcagcccaatgccggaaccgctcttgtcctgtccgttgtctttcgggaagtcgctgttgcggatagagcaaacgatccgtgtcccttcctggtgaatcttcaggtcgataaaagagggtttgttatggctcaccccatgcttgaaagcattctcgatcagggagatgaaaaggagaggtgccacctgggtttcagatgtggcggacgatatgtcggtcgtgagtttcacatgttccggcaggcggatgcgcatcagttccacatagttccggatgaaatcgagttccttctccaacggaaccatcggctggctgctgtcgtagagcacgtagcggagcaggcggctcaggtcgtgcaccgcctcctgcgccttctccgggctgaaagcgatcaagctgtagatattgttcagcgtgttgaaaaggaaatgggggttcaactgacttttcaggttctgcaattccgcttcggcacggcttttctccaactcccggcgggacgattccatctcgtaccaacttccggtcatcttgatggcgacgcttagccctgccaccagcatatacagcatggcgttcaccatgaagaaaccgaccgtctcctgccattccctttccggcctcggatgttcccattcgggatgcgggagcagttcgaacatcagatggacggcccccatcgaggcagcgatcagtacgacattgcatagcaagaacttccagggacgcttggcgaacaggaaatggtcgatcagcacgaaatagttggcatagaacaccagcatgaacgacagcgggacgatcatggagcggacgtagctcaggaccgtcaccgtctgcgactcgcgtccggtgaagaagaacggcagcccgaagaggatggcccaggctgcgatatggatcagcttccccatgcctttgaaggggggagccggtaatgtgtgcattgtctctgttgttcccatttatgcaaagatactgtttattatatatcagagaagcatcgggcatggaagaagtgttgtttctctgtcgaacgccaggcggcatcggtcatggaagaggctctgcgtcgagcatgcctcatcactatgaggtgtattgcctcgtacctatgaggtgagttgcctcatatctttgaggtacgttgcctcatacctatgaggcatgcttgacgcagagcgtcttcttccctcgatgcttcccgcctgctattcgtaacgtattgcctctatcgggtcgagctgtgccgcctttttggccggataccatccgaagaatacacccgtgacggtacatacggcgaacgagaggatgacgctccagggctggatgtagatcggaaagtgggcgacctcgttcacgacaagggctgcgcccactccaaagactacacctatcaaaccgcctgtcacactgatcaggatggactcgatcaggaactgtgccaggatgtcgatgccttttgccccgatactcatacggaggccgatttcgcgtgtacgctccgtcacgctgacatacatgatgttcatgatccctatgccgcctacgagcagcgaaatacccgccacagccgccaacagcacggtcatcatatccgtagtgcttgtcaacatcgtgctcaactcctgctgactacggatggtaaaatcatcatcgtcactttccttcaacttatggttgcggcggagtatttcagaaatctcgtcgatggcctggtcggtgtattcctccttgagggccgaacaggtaatgccttgcagatgggtgatggccaggacctttttctgaatagttgtgtatggagctaagattaggtcgtcctggtccattcccatgctgttgtatcctttgctttccagcacgcctacgatgcggaaaggtaatttctgaaaacgtatgaccttgcctaccgggttgctgccgtcggggaagaggttgtcgacgacggtcttgccgactacgcatactttggcggctgtctggatgtcctgttcggtgaacatgtcaccgtcctcgactttgtagcgccgtatctccaggtagtcgggactgatgccgtagaccgtggtcggggcgttgttggcgccgtagatcgcctgcccgctgctgttgacggaaggagaaacggccgagacaaagcgtgtttcgtccacaatgtcttcgtaatcctgtagtttcagggtttccatcgcggaggcatcctgccggacaccgccacgcacgtcggcgcccgggtgtatcatgatcatgttggaacccatctcactgatctgagcctgtatgcttcgcttcgagccttgtccgatggcaagcatcgtgatcacggaggctacgccgataatgatacccagcatcgtgaggaagccgcgcaatttgttattggcgagtgcccggacagctatttttattaggtttgttccgttcattgtttttgttgttttataagttactctttaaacacctttgcctccttccgcttatatcggatgattccggtattcgcataaaggggcacccgcggaagggtggcaagatcaatcgtcattcttcggcagccgcgccaacgcttctgccgcgttcaggatattccggttgaccgtgtcggaggtgacatgcccgtcgcgcagcgtgatgttgcggctgctgtactgggcgatctccgggttgtgggtcacgaatatgatggtacgtccctcggcatgcagtttctggaaaagaaccagtatctcgaaagaggtacgggtatcgagatttccggtcgcttcatcggcgaggatgacggcggggtcgtttaccagcgcccgggcgatggcgacacgttgcatctgtcctccggacatctggttgcttttatgcatcaggcggtcgcccaaacctacggcaatcagcgattcgactgctttcttgtgtcgttcggctgcactgtaggacggattgtacatcaagggaagctccacgttctcgaccgctgtcgtcttaggcagcaggttgtagttctggaagacgaacccgattttgcggttgcgcaaggtggcgcgggcgttcttacccatcgtgcggaccgatgtgccgtcgaggtaatattctccgctggtcggtgtatccaggcaacctaacgtgttcagcagggtactctttcctgagccggatgtccccatgatggtgacaaattcgccttcgtagatcgtgaaggagacaccacgcaaggcatggaccgtttcgtctccgaccttgaagtcacgcttgatgttttctaatttgattatctctttcatattgttgtactccttgtttggagggcagatatataaagcctgcccctacttggcactcttcttgttcttattgcttcccggagggcctggcatgaacgggcttctttccgtttcggcttcggctgccggagtaatggaggaggcttcgagatcgacagccaattcttcaccttcgttcaggccgtcggttatctcgatcatgtttccgctggtggaaccgacggtaacggctttcggcttcagctcctgcccgttcttgatccatacgagacgtttcccggcaggggtttccttgccggcttcggagacgatgtagcccagttgcgtcaacatcccggcatccggtacgaagcggagcgacttggtcgggactgtcagcacgttatcgcgttccagtgtgaagatcgtcacgttggctgtcaggcgcggcttcaatttaaggtcgggattatcggccgatatcaccacttcgtaggtaacgaccgtcgaggtcgaggtggaagaagagctgctggtgctttcgctgtcgccgaggcggatttgcatgaccgtgccttcgaatacgtcgttcgggtaggcgtcgacggtgaaggagacacgttgcccattttctacgttacctatgtcggcttcatccacgtcggctatcacctgcatcttggtcaggtctgccgcgatggtgaatagggtcggagtctcgaagccggcggctacggtctgtccttcttcaactgcgcggttgatcacgacaccgtcgatcgggctggtgatcgtcgcatattcgaggttgcggttcactttgaccattgccgcttggttttgttcgtaggcggcttttgctttctcatagttgtatgtggacgtttcatagtccgagtcgctgatcagctttttttcgaagaggatcttgttgcgggcgtaattcttctgttggtactcgaattcgcttttgctgcttgccagctgtgcctcggcggatgcgagttcggctttcaggttgaccttgtccatttcggcgatcaactgccctgctttgaccacgtcgttatagtctgcatacaacttgtcgatgataccggacacctgcgtgccgacttcgacttccgttaccggctcgactgttccggttgccgttaccgtgttcgaaatggaactgcggcccactttggcggtttcgagccggataccgcctttcgacgttttgcctgtgaagaaccagatgcctccggccacgaccaatacgcctactataccgataattagtttcttcttgttcatatctttatctgtttttatttctttctggatgtcgatcccttttgcaagggaggtgtgccaaaagtgccttgttcctgcgtcaggcgcggagataaggagattttgacacatcctccgaaacaaaaagagagtgaatatattcattagcggttcacccctaatgtcatgtctcagaataaattgatttcttctccttggtagaagcgcaacaagcctgcgttcagtatggccgtgtatttggcctggagcgtttcctgttgtgcgcttaacaggttatttttttccgtgagcaattctactgtatttttcatgccgacgttgaattgttcgctgacgagagagtagctggtttccgtgctcttcaacttctgtgaagctgccacgtattgctgttgtgcgctgttggcggccagccagaggttttcgatggtcttgtagagtgtcttcttgttgtccagcaggtccagctggctagtctgcttttgcagcttggccttgttgatggaacttttcgtctgccgcttgtcgaagatggggatgctgagggtcagtcccagcgagttgttccagttctgcttgacctgttcgctgaagctgaagtcgctgccgttggcattcgtgcttccgatgcctgcgctgaggtttaaggtcgggagatatcctgcacgtgccatcttgatgctcaggtccgagctctccacgttcagctttcctgcttctatttcgggacgcaggctgagggcggtgttgtagacatcgtctttttcgggaagcgggatcaggacgttgctgtcgctcagttgcggcaggtagaggtccatttcgatgtctccgtccagttcgagaagctgtttcaattgcaacttataatcctgcagggtagcctgggaggtcaccagctggtagttgtcgctgctgacctgcgcttccagttgggcgaggtcgcttgaggcgatactgccgacgttgaacaattcctgtccccgttcaaactctttccggcttacttcaagtgtcgattcgtttactttgacagcttcggccgagtagaggatctgtacatacagttgggtgatactttcctcgatcgagttttcgctttcgtccacgttcagttcggcgatgcggttgttcagcttctgttgtttgacggtgttcacccgtttgctgccgttatacacagtccagttggcgtcgatgccgtagctgccgttgtacgaggttttgctttcgcttgtcgtgatgttatcgccgctgatgatggtgcctcttgcactgttcgggcggttgacgacgcgctggctgatgttcccgctcaaggaaggcaggaaatccgccttggctgtctttacgtcttcttgggcactctcggcgctgatgcggttccgctgtatggtgatgttatgctccagggcgtaatcgatacaatcgcgaagcgtccattgtttgggtgcgtcttcctccgcattcatcccggcgggcaggagaagcaggcaggagaggagtagggaagaaatctgtttcatgatgctttcgttttgtaacctgacaatctttttacctttttacgaaagcaaaactacaacaggatgaaagcctgcacaatcagattagaaaaagaggagcgtttcctcgacaaaggaggactttctatcgatgaaagcctgacttgaaataagggtgtttatccatagaaagtcctgaatattgattgtggaagtccaggttttttactctgaaggtcctgacttcttgttacgaaagtcctgacttttgcggtaaaatttaccaatagagaactatcccggcgattcctgccaggataatcatcaggatcgggttgatcttgaacttccaggtgaggatgaacgcagccccgaagatcaggaaacttttatagtcgatgaagttctcgctattcatcaatagcaaagccgctgccgcaatcaggccgaccgtagccggacggaggccgtagaacgcggctgctacatatttgttgttcctgaattttgcaaaggcgtatgagatggccagcactaacaggaaagagggcaggcagacggcaaatgtcgtcaggcaggagcctaatacggccatcgcgggcgaatagccggcattgtggatggctgtatatccgatgtaggtggcgctgttgatcccgatcggcccgggggtcatctgcgagatggcgacgatatccgtaaattcctgtgacgaaatccatccgtagcggtccaccacgtctgcctgtatcagggagagcatcgcatagccgccaccgaaaccgaatatcccgattttcagatatacatagaataattgcaaccagatcatatcagtctttctttattttcagtccgtaaacaagtcctcctatgatagccgccagaataatccacacaggagacaaccctccctgccagatcagcagtgcggcagcgatagggataaccagctctttgtaactcatcttgatcgaacgtgccgttgtcaggcaaggcacggcaatcagggcgacgaccgccggacgcaatcctttgaacgccttctctacccatatgttgtcctgcacgtgtgtaaagaacagcgcgatagccagaatgatgaagaaggagggaaggatgcttcccaaagcgcaaacaataccacccggcactcttttcagtttatatcctacaaaaatagagatgttcacggcgaaaatgccgggcaaggactgggctacggagaagaggtcgataaaatcttccttcgaaagccatcctttatctaccacttcccgctgtatcaggggcagcatcgcatatcctcccccgatagtgaaagtccctattttgacgaatgtcagaaaaagtgtccagtacataatcctttagaataaatctgaatgtgttccggttgaggttaatatcaaaatgagttcatcatcgttttgctcccatattaataaccaatcgcctttaatatggcattcccaatagttagcataattaccacttagtttgtgggcacgatattgttttggtaatgtcccgttcaatttgagttgctctattacagtatagaggaggctaagttttagtcccctcttcttacatatttccaagtccttttcaaatcgtttagtgattaggatcgtgtatgaactcataatcccatcatttgttttaattcatccgtagaaacttcgcgaacacgcccggctttgatatcggcaatgccttcatcaagacttttctgagtttttgtgtgtttggttgtcagagtccatccgaatttcttcgctattgtcttaatgaaaggcaattccgaatccggcaaagtaagttctatcgttttcatcgttgtgtccatcttttgtgttcctttcttttcgttgatgaatacaaatataggaagtattatcgataataggtttaccgtcccaattcttttttgtaccgctgttcgtcgttgatgaggcgcaaggcttcctggaagctttcgttgtcgtcgttgatgacctggaagtattcggccatatcatacaggtcgcgtgcgataagcgccttgatttggagcatgatgagcggcttggaacggttgtattgctcttcgttgaactcgatcttgtcgtctttagccagtgtgaccagttcttgcattatgtcgtctgtcacgttgaagttctgcttgtattgggcgaacttcggatatttcttgttcagttcggcacgatgacggtccagataattcatggcgatgcggttcaccagaccggccgccaccacactacggtgataatccgtatagcgggacgtgtcgaccgggataaagacatccggcatgataccgccgccgccatacacgatgcgtttcgtctccagcgtattgtacttcatcgaatcggggaaatggatgctatccgcactcatcagttccccccggttgtagcggtcgatcaagtcatggttgtattgctcctggttgccgttgacatacggtttctggatagaacggcctgtaggcgtataatagcgggcaaccgtcaggcggatcatcgagccgtcaggcatcgggatcggtttctgtaccagcccttttccgaacgtacggcggcctacgaccacgccacggtcccaatcctgcaccgcaccggaaaggatttcactggcggatgcggatgtttcgtctaccagcacgaccaaacgtccttcttcaaaccctccacgggccgaagacttggcttcctcgcgcggttgtttgtttccttcggtataaacgatcagcttgtccttgcctaagaactcgtcggccaggtcgatcgcgatattcagatatcccccgccgttcccctgcaagtcgaggatcaggttcttcattccctgtttcttcagtttctccagtgcttcccggaattcgtcggccgacgaagcggcaaagcggttcagcttgatgtatccggtagtcttatccgccatgtaagcggcatccaggctgtataccggaatctttccacgtgtgatcttgaactcgatcaggtcgggcactccgccgcgcaggacctttacccgcacttccgtattcttcggaccgcgcaggcgtttcatcacatccgtattcttcatcttgacgccggcaatcagcgtgtcgtccaccatgatgatgcggtcgccagccatcaggccgaccttttccgaaggcccgccgggaattacctggatcacgtataaagtatccgtcagcatattgaactggatgccgatcccgtcgaagttaccttgcaacggttccgtcatctctttcgtctcttccgggtccgtataggtagagtgagggtccagcttttccagcatgccgacgatggcgtcctccaccaacttcgtttcgcttgtagagtctacatataggttggagatggcatacagggccaactggagcttgcgggcatctatgttgttaccgcgctgtgccgacatcgaggcggcaaatatactcaatataaggagtggaagtaaaattcgtttcattgtttttattttttaataaaggtttgtccctttcggcacaaactgggaaatatctttgccgtaacgcagtaactcccgcacgatgctggagctgatatgcgtatgttccggttccgtaaaaagaataaatgtctcgatcccgctcagcttgcggttcacatcggctatgctcttttcatattcgaaatcgttcaccgtacgaataccgcgcaggataaacccggcattcatctgttgggcgaaatcgactgtcagggagtcatacgacatgacccgtacgcgcggttcgtccttgtagagctcttggatcgcctccagccgtttctccagtgagaaataggttcgtttcgtgtcgttgataccgatcgaaatgatgatctcgtccaccagttcgagtcctcggcttaccagcgattcgtgcccgatcgtgaaaggatcgaacgttccggggaaaagagcgatcctttttaatggacaactggcaattgacaattgacaattatcggttgattcctgtccctcccctgtttttatcgtattatccatattctcaatttattgtcaattatcaattgataacgtcttcttctacaactaagttatctatgataaagttctgtcgttccatcgtattcttgcccatatagaactccagcatatctttcacaaggtcctctttcttcatggttaccgggtccaggcggatatcctttccgataaaatgcttgaactcatccggtgagatctctcccaaacctttgaaccgggtgatctcggcgttttttccggcggcagcgattgcgttcacacgctcttcttcgctgtagcaataccaggtcttctgcttgttgcgtacacggaacagtggtgtttgcaggatatagacatggttccgcttgatcaggtccgggaaaaactggaggaagaaggtgatcagcagtaggcggatatgcataccgtccacatcggcatcggtcgcaatgatcaccttattgtaacgtaagccttccaatccatcctctatgttcaatgcagcctgtagcaaattgaattcttcgttttcgtatacgatcttcttcgtcagtccgaaactgtttaacggtttgccgcgaaggctgaataccgcttgcaggttcggatcgcggcttttcgtaatagaaccgcttgccgagtctccctcggtaatgaagatgcagctgtcttccagattgtcgcctttcgtgtcgtttaggtgaatacggcagtcgcgcagtttcttgttgtgcaggttcgccttctttgcccgttcgcgggccagcttggtcacaccggcaatcgctttgcgttctttttccgattcctggatcttacgcagcagggcgtccgatgtctctgcgttcttgtgcaggtagttgtccaattccttcttgatgaagtccccgacaaacttgccgaccgaaggtccgtccggccccatgtctttcgagcctaacttggtctttgtctggctttcgaacaccggttcttccaccttgatgctgatggctgccaccacgccggcgcgaatgtccgagtattcgaagttcttgttgtaatattcctttatgacacgtcccaacgcttcgcggaaggcggaaaggtgcgtacctccctgtgttgtatgttggccgttgacgaacgagtaatattcttctccgtactggttactgtgggtaatgaccacttctatgtcttctcccttcaggtggacgatcggatataaaggctctgtcgtcatgttctcgttcagcaggtccacaaggccgttgcgtgaatggaacttcttgccgttgaagacaattgtcagtccggagttgagaaacacgtaattcttcagcagactctcgatatattcgtctttatactggtaatccttgaatatctctttgtccgggatgaaataggtgagcgtcccgtttgcctcctccgtcgggcagatcggggcttcctccgtgatgactgccttgttgtattctacccgcttgcattcgccgtcccggtaactggtgatcaggaaatagctgctcaacgcatttacggctttgattccgactccgttcaatccgactgactttttgaaagccttgctatcgtactttgctccggtattcatcttgctggagacatcgactaccttgcccagcggaacgccgcggccatagtcgcgtacggagacggtgccttcttcgacggtcacttctatggttttaccgtaacccatcatatattcgtcgatggagttatccagcacctctttcagcaatacataaataccgtcatcggcataactaccgtctcctaatttcccgatatacataccgggacggcgacggatatgttccatccagtcaagcgtcttgatatcgtcatcgttgtacgctgtcggctgttgcattgttgaatttagttcgtccattttgaaaattgaaagttgaaaattgaaagttgaaaattgaaagactgggaataaaagaataaagaatcactttcccctttcaactcttccctttcaactgtttaatgtatgctcttcttgtcttgtgatgctcgcgtttgaagtaatcccactgtgcctgtacggcattgttcgtttccagttccggattgctttccgcataaatagctccgacactcttgtaaacaggtatcaggtcgttgaacagcaatgcgttcacgcctttgctctgatattccggcaagacacccgtcaggtaaaggtcgatcactttcggcttgctcttcaaagccttcagcagataaatccaaccgaacgggaaaagatgccctttcgctttctgcatagccttggacaggttgggaagcgagattccgaaaccgaccacttcgtcgtcttcctcacggacgataagcgtcaccaggtcgtagcgaagcatcggaatgtacatattgatgtagtagtcgatctgcttttgagtcagacgtgcgaagccgtataacggcgcgtacgactcgttcaatgtccggaacaccttctgcgcgtacggcatgatcgatttcgcgttcttaaacttcataaccttcagtccgtatttcttctttacgatctcgccgatacgcagatgtttttccggtactccgtccggtatatagattttgaactcatgccagtcctggtcttttgtatatcccatacgttccatttgcttcggatagtaaggataattgtagatggtcgccatcgttccgatctggtcgaacccttcgatcagcattccttcgtggtccatatcagtaaaacccatcggcccgtgcagcgcgtccatgccttgctctttcgcccatttctctacggcaccgaacaaagcatccactacttcaatatcgtcgataaagtcgacaaacccgaagcgtgcatgtttctgattccacgtctcattgctccggcggttgatcatccctgcgatacgtcccacaaccttcccgtctttgtatgctaaaaagtagatcgcatcacacacttcgaacgccggattcttctttttatccaacgtcaccatctcttcttcgatcaggccgggcacatgatacgggttgcctttatataattcgatattgaactttacgaactttttgagttccttcttactggtaacttctttaattactacgctcatcggtcatttagtttgaacggcaaatttacacaattaattcatttttagtgccggttggcaagaagaaaatgttttctcttcttgagcccataaaatctttggcgtctattttgcatcggaattgaaacggatcgtaatggtttgtcgatggaatgaaagggattgtgcttttatctctgtattgtccttttgtacaaataactcgattttaaggtgtgtaatgattccaatttcttatctttgtggcgttttcgttgttccttgtgtgggagtgacggacctttgtgtatccgaaactttatttggaaacacttaatcgtaacttttatttgattataaaatcatgaaaatagctatcgtcgggacaggttatgtggggcttgtcaccggtacttgttttgcagaaatgggaaccgaagttttctgcgttgacgtaaatgccgaaaagatcacaaacctgaaacaaggtatcatccctatctacgaacccggccttgaagagatggttcaccgcaaccagcaagccggccgtctccatttcacaaccgatttgacagaatgcctgaacgaggtcgaagtcctcttcagtgccgtaggtactccgcccgacgaagacggtagtgccgacctgaagtatgtgctcgaagtagcccgtaccgtcggccgcaacatgaccaaacatctccttgtcgtgacgaagagtactgttccggtaggtacggcccgtaaagtccgtgagacgatccaggaagaactggataaacggggtttaccgcttgagttcgatgtggcttcgaatcctgaatttctgaaagaaggtgcggccatcaaggattttatgagtccggatcgtgtggtcgtcggtgtcgaatccgaacgtgcaaaggagctgatgactcgtttgtaccgtccgttcctgttgaacaacttccgtgtgattttcatggatgtaccatccgccgagatgacgaaatatgcggccaatgctatgctggctacccgtatcagctttatgaacgatattgcgaacctgtgtgagattgtcggtgccgatgtgaatatggtgcgtaaggggattggctcggatgcccgtatcggcaaccgtttcctgtatgccggtatcggctatggaggttcctgtttcccaaaagatataaaagcgttgatcaaaacagccaagtcgaacggttaccggatgcgtatcctagaagcggtcgaggcggtcaacgaagagcagaaatccatcttgttccgcaagttggacgattatttcaaaggcgatctgaaaggcaaacggatcgctatgtggggcctggccttcaagccggaaaccgacgatatgcgcgaagccccttctctggtcttgattgataaattattggcttccggttgtgaagtgtatgtctacgacccagtctcgatggaagaaacccgtcgtcgtttgggagacaccctccattatgccaaagacatctatgacgcggtagtggatgctgacgccctcttgctcgtcacggaatggaaagaattccggatgccttcctggtcggccgtcaaaaaactgatggcaaccccgctgatcttggatggccggaatatttacgatgtgaaggagttggaggagaatggctttgtttatcattgcatagggagatagataagattatccaatctttttggaatcaaatcaataataaacagaaagtaagcgacaacccgctttttcatcgtcaggtttatacctttttctattgaagaaaaagacgccgtagctattgaagggagcatcagtgatccgcgtaatgcgattgtgtttaaaatgtttgtattctttgggagtgtcttatcaccccaaagaacatcaaacagtatatgagtgacttggttgaatatggtctgttaatccctttaatcccggataatccgggccattcgaaccaaaagtttgtatcagtcggataatatttattctgtcctgacttcgcttaattatgaagagtggattgagattggagaaaggaaaatcggaggaatgtaaggaataatgcaaagatcaaaattaatacataaagtcagtaatttgcttcacccaatagcacctgaagtggatatcaatttttatggttcgcaagctaaggagaatgtagggctggattcggatatcggcttgctgatccttgtcgataaagaaaaattgtcttatgatgcggaaatatttgatgcgttaagccatcaatcagaagagtttatttctgctattgaaaatttttaaaggaatgaaataataaatggcagaacaaactctgaaagaaaaaacagccaagggacttttctggggagggctgagtaatggggtacaacaggtgttgaacttggtgtttggtcttatgttggcccgtattctggatgcatccgactacggaatggttggaatgttggcaatctttagcgcgattgcttcaacgattcaagaaagcggctttactgcagcacttacaaatcaaaaggaaatacggcatgaggattataatgccgtattttggtttagtacgctaacaggagtattgttctatttgatccttttcttttgtgcaccgttgatcgcccaattttatgataaaccggaattaataggtttgtctcgtattgtctttttaagttttctatttggaggctttggaattgcatcgaatgcttatatgtttaagatgttgatggttaaagagaaggcgaagattgatatcatatcgttaatctgctcaggaactatcggagtcatattagctttaaacggatttgcttattacggattggcgatacaaacgacaacttatataggaatcagttcgttgttgaaactatattttgcaccgtggaaacctacatttcagataaattttagccctctgaaatcaatgtttggctttggctcaaaattgatattgacaaatatttttacacagataagcaacaatgtcttttctgttgttttagggaaattttataccccacagcagttgggcttttattcacaggggcagaaatggatgggaatggggcaccaattaataggtggaatgattaatggagtagcacagccagtgttagttcaggtaatggatgataaggaaagacaagtgcttgtttttagaaagatggttcgttttggcgcatttatttcttttccggccatgttgggattagcctttgttgcaaaagaatttgtatggattttattaggagaaaagtggttggacagcgtaccttttcttcagttgttttgtttttggggagcaataggatatttatctcagttgtatgtgaatgtattgatgatttattctcgatcagatatttatttattgggaatggttcttataggtatattccagatattgataattggggtgttatatccttttggcatatttaatatggtaattggatatataggaatttatttccttagtcttttcttttggcatcattatgtgaagaagattctaccaataagatttattttcatatgtaaagatgtcttatcttatttgattattagcgttctactttttgtactgctaagttatatattaagtggaatgactaatttatatattcttttgtttgcaaagatttttttatatactattttttatattctatcattaagattgttaggatctaaaatattcgaagattgtttggaatttgtaaaaagcaaaatgctatgttaaaaatatcagtggtgttgtgtacatataatggtgaaaaatattttaagagaacaattagattctattataaatcagacatatcctatttatgagattttttatgccttttttgcttatagagattgtggggtttctgtatagttttacgtattgatttcgtatattatgttagtaaaaatatataaaaaaataccttctagattgagaagtaagatttatgatatttttctaagtaatattttgttgtattatagaaaaacatctgtttcgttatattttcataataagagttggcgacgtttgaataggcataatagtacttatttatgtggaaattatccatttggaatgatatcagtgggaaattatacttatggaaagattgatataaattttttcacaaataaggaaaagctaattattggaaacttttgttctattgcagatggtgttaaatttgttacaggagggaatcattttgcggatagattattgacattcccagtaggaagtatttataatataggaaaggatgatggatatacaaaagggccaataatagtggaagatgatgtttggattgcaactaatgctttgattttatcaggagtgacaattggacgtggtgctatagttgctgcaggagcggttgttgtaaaagatgttccaccatatgcaattgttggtggaaatcctgcaaaaatattgaaatatagattccccttagaaataagagaatctttgatgaagatggatttctctttgttgacgaaagaatatatagaacagaacatagattttttttattcctatatttcagtagaatctaaatggtttacaaatttgtgtaaatgaaaatatgataaatgtactaattatatttggaactcgcccagaagcaataaagatggctccagtggtgaaaacactacagaaaaataataatatttttgatgtgaaagtctgtgtgacagctcagcatcgtgatctattagaccaggttttagagatatttcaaataaagcctgattatgatttgaatattatgaaatcgggacaagatttatatgatataacaagtcgggtattattggagttgaggtcggttttaatagaggctaaaccagatgtcgtattggttcatggtgatactactacttctatggccgcatcgcttgcagcattttatgctcaaataccggtttgccatgtggaggctggtttgcgcactcataatatttatagtccttggccagaagaaattaatcgacagataacggggcgtattgcttcatttcatcttgctcccacggagttgagtagaaagaatcttctgaaagaaaatattgatccgacaaaaattgaagtagtcggcaatacagttattgatgctttgcacatggcactttcattattaaaagaaaataagtctttgcaaatcaataatgaaaatcttcttttgcagagtcgaatacctgttgagctattatcaaaatggaaagaacatgaaagagtattagttttgataacagggcatagaagagaaaactttgggaaaccttttattcaaatttgtgaaagtataaaaactttgtcattaaagtactctaatgtggattttgtttatcctatgcatccgaatcctcatgttaaggaagctgtggagtctgtttttggagagatagaatcgatttcaatgaaatacacgaatttgttcttttgtaatccattggagtatttgccttttgtttcattaatggagctatcttatttgatattaacggatagcggagggatccaagaagaggcaccaggattaggaaaacctgttttggttatgcgtgatacgacagaacgtccagaaggagtagaggccggtactgtaaaattagtagggacaagtaaaatgaaaattgtagatgaagtttcttctttattggaaaatcatcaattatatatggcaatgagccaagcccaaaatccttatggagatggatatacatctgttcgtatctcagaaataattaaaagattgttctcaagtaaattatcatgaatgtaggaattgtaacgacttggtttgagcgaggggcggcttatgtttccagacaatacttggaggctcttcgatctgattcaaacaatagtgtgtatatatatgcgagaggtggagaatcatatgctcgtaatcagtcagaatgggatcgtgattttgttacttggggaaaagtaaataagaaatattattgtggagcaactggaatagaaaaaaaagattttatagattggcttaaaaatcgacaaatagatgttgttctatttaatgaacaaaattggtggattccagtaatttggtgtaaagaattaggtattaaagttggtacatatgtggattactatactgaagaaacagtacctttttttgctatatatgattacattttatgtaacacaaaacgtcattatcggttgtttaaagatttacctcagagtttttatatcccttggggtacagatattaatcttttctctaataatattgaagaatcatgtgaacaatcacagattacattctttcattcggcaggaatgaatccgataagaaagggtacggatactgttattgctgcttttttgtcattacctgctttttataaggataaggcaaaattacttattcatactcaagtcgcattagataattatgtagcaaggtatgatcaatcaatattattgagttcaaatatcgaagtgaggacggagactgttgctgcgccaggactgtatcatttgggagatatttatgtttatccttctatattggatggtttaggcttaactgttgcagaggctttgtcttgtggattaccctgtattgtaccagataatgctccaatgaatgaatttatacaaagtggaataaatggacgtatcgcggacgtagaatatttgtacgctcgtagtgatggatatttttggcctcaatgtaaagtttcagttaaatcgattcaagaacagatgatttattatttgaataatattgatagaataaaggtatttaagaaagaggctcgtatttatgcggaacaaaatttgaattggaaagatcgatatatgcaagtttgcgagatattgaagaatgcaactatagcaccatataaggaagatttagttgatcaaataaaatgttttgaacatagaaaaacaggtaagtttaatgtactaccttatgctttctattattggaaaaaactgaaaggataaaatgagattattatatattgcagtacatgagcaaaataaagattggggggctgaacattttttagcaaaggcgttcctctctttaggtgtggatttagtaactatcgattatagaaaacataggaaagatataattcaacgaataaaacaagtaggagattttgactattttttcttacaaagaggagatgattttcctataggaatattaaaatcaatcaatagacccaagttcttttgggcatctgaattagtttcaaggaatagagatcaagaccgattgttaaattcgggcttatttgaacatgtttttgttcacacattagcctgtaaacgttcaattatagagaaaggttggttgacagaagataaagtaactgttctattaaatggctttgatccaatgtcacattatccaatagagggaataaaaaaagatattgatgtcttatttattggaaatatgcttggtcgacgaagaaagtggctggatgaaataaaaagatcgtgtaatctatatgaggcagttggaatttatggtgctgatatggttcaattggtaaatcgggccaaaatagtattgaatattcattcagaggaatatttggatacagaaacaagattatttgaagtaatggcatgtagatcttttttgttatccgagagactgtctgaagattctccatttgtaaatggtttacacctggttgaggttatggatgtaaaggaaatgatttcttctattcagatatatctggaatcttctgaacttcgtcagaagatttcaaatggagggtatgaatgtgttatggaaaatcatacttatttgaaaagggctgagttgttgttatcactgtttacttcttattacaaaactggacagaatctgtctgttgatcctatccagttaaagaaagcggtgttagaaagtttttatttgtatgagaaaaatcgtttgcttgattcttataggcaattaaggtattcgataagaaaaagatttaaatgaaaaagaaggatattattttaagagtttggggtggagttggcaatcagttatttatttacgcttttgcaaaagtcttatctttgattactgattgcaaagttacattagatataagaacgggatttgctaatgatggatataaaagagtttatagattaggagacttttcaatttcattattgccagctttacgcttttatacattattatcctttgcacaaaggaagatgccttatataaggcatcttttagcatataaatttgatttttttgaagaaaatcaaaaataccctttagaaactttggatagtttttttaagatttactcggataagaatttgtatcttcaaggatattggcaatattttgattttagttcctatcgagatgttttgttaaaagatttaagatttgaagttgaaattaataacacttatttgtattattctgatttgatagaaaaatcgaacgcagtagctattcattttagaaggatacaatacgaacctgttataagtatagattattataagaaggcaataaaatatatatctgaaaatgtagaaaatcctaccttttttattttttcagatgatataaattggtgtagagaaaatctatcgattaatgggatttgtttttttgttgagaattttaaagatgaactttatgaactaaaattaatgagccaatgtaatcattttattattgctaatagtacttttagttggtggggagcgtggctttcagtgaatgcagataaaaaggttattatgccagatggttatacagatgtaagtatgaatggttctattgtacatatataaatgaagaatatgaaaatagcagtaatcggcctcggctatgttggtatgccattggctgttgaatttagtaaaaagtatccggttgtcggatttgatataaatgaggctcgtgtaaaggagcttcaaggtggaagtgatagaacaagagagattgatagttcatctttgaaagaagtgctatcgctttctgatacaaatcatgcgataggcttgaaattaagccatgatatagaagcattgcatgattgtaacttctttattgtgacggttccaacccctataaccaaatttaaaactccggatttgaagcctttgttaggggcttcgtccacggttggcaaagttttgaagaaaggtgatattgttgtgtacgaatcgaccgtgtatccaggttgtacagaagaagattgcgtgcctgtattggaaaaggaatcaggtttgaaattcaatcaggatttcttttgtggttattcccctgaacgtattaatccaggtgataaaaagaatactttgacaacgataaagaaggtggtatctggatcaacacctgagattgcagataggataaacgaactttatagctccataattaaagccggtacatttaaggcttcttgcataaaagtcgcagaagcttgtaaagctattgagaatgcgcagcgagatgtcaatatttcttttatgaatgagttggctcttatttttgataagatgggtattgatacgcaagaggtattggatgctgccgcgacaaagtggaactttttgaagtttgctcctggcttagtaggtggacattgtatcggtgtggatccgtattatttgttacacaagtcacaatgcttaggatataatccgcaagtaatactatcagggcgtactgttaataatgaaatgggacgttttgtggcttctaaaactgttaaactgatgatccgtcatggcataaagattgtcggaagtaaggttttggtccttggttttacttttaaagagaactgtccggatactcgaaatacaaaagttgtcgatattattgatgagctaaaagatttcggggttgacgtagatgtgtatgatccttatgctttaagagacgaagtaaaggaagaatatggcgtcgaactgttggagcagatgtcggatatcaagaaatacgacggtattattttagctgttgctcatgatgagtttaaacagttggattttggcttcgttcgtaaccagccgaccgttttatttgatgtaaaaggcgtcttggataaatcattagtgtacgggagactttaaaatgaaattagcaccaattgttatatttacttataacaggccgtggcatactcagcaaacggttgaagcattgttgaagaatgaatatgcttcagaaagtgatttgataattttctctgatgctcctaaaaatgaagcggctaaaaaaggggtggaagaaactcgttcctatattcgaaatattacaggatttaaatcgttgcgtattattgagcgagatcggaattttggcttggctaataatattattgatggtgtcacttccattgtcaatgagtttggaaggataattgttttagaagatgacttgcttacttccccctattttttgaagtttatgaatgaagcgttgtctttgtatgaagatgaagaacgggtgataagtgttcatggatatatttatccgataaaaaaaagcttacctgatacttttttcataaaaggagcggactgtttagggtggggtacttggaagcgaggttgggatttgtttaattcaaacggaagtgaattgcttcattgtttgaaagaacggtctctcactagaacgtttgattttgaaggaagttatccatatactcgaatgctggagagacaagttaatggagaaataggctcttgggcaatacgttggtatgcatcggcttttttagaagataagctaacgttgtatccgggtaaatcattgatttatcacaatggaagtgatggaagtggcactaattgtggaacaagtgaggagtttgatgtggagctatcgcaagaaccgatattagtttgtccgattgaaattaaagaatccgaatatgctcgaaaacaatttattttttattttaaatatgtgatcttatgggcaagaattaaagatcggttaagacatatttttagattaaaaacgcatgcttaatttctgtactctttttgattctggctatctctccagaggattggcgatgtatgagtcgttgaatcgacattgtaaagatttccatctttatgtgttcgcttttaatgatgaatgcttttcggttttaaaatctctttatttggcaaatatgacggttatttccttgccagagtttgaagatgaagaattattgaaagtaaagccaaccagaagtaggggagaatactgttggacttgttcttcttcaacgattttgtatgtgttggataattatgatgtcgatcattgtacctatattgatgcggatttgtatttttttgcttctcctcaaatactgttggatgaaatggatgaaagcgagtctgtgttaattactccacaccgttatacgcctcaatatgatcaaagtgaaaaaacaggaatatattgtgttcaatttgtttattttaggaataatcaacaagggcgtaaagttctaacgtggtggcgtaaggcttgtttggaatggtgttataatcgttttgaagatggacgttttggtgatcaaaaatatttggatgattggcctgaacgttttgaaggcgtgcacgttctccaacatttaggtggtggtgtcgctccttggaatatgcagcaatatcgttttgagcaacaaggaaaagagataataggtatagaattggagacggaaaaacagttccctcttgttttttatcattttcattcattagtatttgtaactccgttttatttttctcctcgtccttattataagaggaatgattctactattatattgctatttaatccatacgtgaaagagatagtgaagttgagaaaacaatatgcgttaggtaaaatggaacattatttatccggatggaaattttttaagtatcttgcggaagtttttgttagaagaggatttaaagaaatacattatataaaattattacatcaataataaatggctcatataattgatttaaagacttttacggatgataggggaaatctgactgtgatagaaaaagtaataccttttgatatcaaacgtattttctatatttatggagttgatgattctactaggggagggcatcggcatcataagactatgcaagcagcaatttgtttgcagggacattgtacgatatcaaataataccggagtagaaaagcaagagtttgtattggattcacctcataaatgtttgatattggatccgaatgattggcacacgatgcatcattttagtaaagatgccatattgatggtacttgcttcggaattttttgatcctaacgattatattttcgaaccttatgattgaatatgaaaatttaggaaggacgaataagtctttagaaaaggaatataaggagtgtttttcttcttttttggaaagtggctggtatgtcttgggcaaagaggtgagaacttttgaagaaagttttgccggttattgtggagtcaagcattgtattggagttgcttcagggttggatgccttaatgctggctttgcgtatttatgattttccgcagggaagtgaagtcttggttccttcaaatacatatattgcaaccattttgtccatattgcagtgtggcttgaaacctgtattagtagaaccagatattcgtacttataacattgaccctttaaagatcgaagaacatatctctgaaaaaacaaaagcgataatggtggttcatctttatgggaaagcctgcgaaatgacttctatcatgcagctcgctggaaagtataatctacaactgatagaagattgtgctcaagctcatggagctaaatataagggacagaaagttggtacttttggaacaggtgcattttctttttatcctacaaaaaatttaggagcactgggagatgctggggctattactactaatgattcaaaagctgattctgtgtttagagcgttaagaaattatggttcaaatatcaaatatcagaatgattatattggctataattctcgtttggatgaaattcaagcagcgttattgaatgtcaaactaaaacatttagatgaaataaatgctcataaaagaaaactagctcaaatttatatagaaggtttaaaggaagattttattaagccaatagttacctccgactgttttgatgtgtatcatatctttaatgttcgacaccctaaaagagacatgttgaaagagtatttgctgaaaaatgaagttaagacagatattcattatcctatacctcctcataggcaaaaagctatgcaaggtatattaaaaggggagtatcctatttcagaagaaatacatcgtacgacattaagtttacctatctcttatgggcattcggaaagtgatgtatatagagtcgtagagataatgaataaattttgaaatatggttcataaactacttgtgtactataaatatcagcgattttttcctgggctaattagtatattaattaatctctattccttttttcatttgtcttgttcataacacataagaaatcaacgaaaacaatcaagagccgtggcctttaggacatggctcttgatcattttacctcaccccatcagccacctgcagacgcatcccactcccccgcaggcgatcagtgtgtagcctgagattcccagccagtcggctgagggtggctggtggtcgggggaagaggggcgtcgggattcttgggaatgtggggagggggttggttgttcttcaggagggagagaatcccgccgatgcaggccagggtcacttccgtttcccccttccagagggagaggagggacaggaggaggaggctggggaggaggacaaggacggtcgctgggagacggtttacgcttgcggggaaagatgacctgggcgagcgtgaggaagaagttgagtactgtttcaaggactttcataaattagaaggatttttcaatttttaattctcaatctttaattttctcgatctgtcggcagagctttatcagcaagatgcggtaggcttcgcggttgtcgccgttgacttcgctgatgtaacggctgtatgagatggaacgggcgaaagcctgcgggttgttgctgacgtcggccgccggggtgtaggcatggcggatcaggcgggcgtagtccatgaaggaatcctgcggagtgtcgtagacacggaaacggagggagtgggcgcccaactcgataccttcgcctttccaccagacgtttttcttgccgtaggcggtgataccgaaaaagttatggtgctcgcgtgcgaggtcgctctgtccccaacccgattcgatgaccgcctgtgccaggatcactaccggattgatccggaaactttctcccgccttgcgggcaagagggagatatgacgatataaaatcaacctgttctgctttcattttcttgttgtttttggacactgttttgattttttacaaacagccccttttaattatattcttgttgttttcgcctgataatttgaacgtcttttcggtcatatccgcccctctcttcttcgtcagatagcttgcttatcctcctcgtcagagtgacggatctgcctcaaaaagacttctcaaatcatcaggcagaaaaatcaaaacagtttcttagtctgtttgaatttagcttccggcctacagttcacccggtttctcctccccgcctccggaagacggtttgtcaccggccgggaccaggtcgagatgttcgaatgtgacattctttttcacctgcgtcagcatggtccccggcgagaagacgatacgcgccttgttgaagaaagacgtgttgaagtctgcttcgttctccacccctttgctgcctgcgaccatccggaagttacccaggcggcccagctggatcacatccccttcttccaaccgttcctccatgacggacaggatgccgtcgatgaccagtttcacatctcccacgaaggcggagctgcgcactgccaccatgttacagaacttttcgaatttcaatttcttcaaggaacggacctgtgcatagtacagcttcgagccctcggctgcgtctttgcgcatatccggtcttcttaccaagcgatagtttaatgacataagcgtgattagtttttaagtgaatacttttacggaatctttttttcattatcgataacaagacaaaggtaaggtcccggtacaggcagaaatacagattggggaacatcggcgaagatcgatgcggaaacaggtaaaaagaagtaggatataaatgtgattatctattgaatattgatttttattccgtatctttataggacaatgaaacgatgggaattatgatcgtaaacgaattcgaaatcagaagttacgggtggcaggaattggcggtcctttacgggccggatttgatgccggaatcggccgggaaacggttgtccaaatgggtgggggcagacccggtgttagagacggagctgcagggctacggttggcggaaagggaagaagacgttgacaccccgacaggtgaagacaatcgtgcagtttttgggtgagccttgaaacaagggacttctgtgtacgaaacaagggactttgacgtgtaagaccagggaacttgggagacaaaagaccggatttccggatgcggaagagggtactttttcccatcgatagggagaggataaaggccggccggcattgcaggcaataaatagataagcatatgagcaagttaaaaaaaagcggaaaggtgactattgccgctcgtacaagaaaatcagaaaagaggtacgggacgcgtccgatccgctgtacgaaatgatcgtttatgcactcttccttacggaggaggccaaggggaagcaggagaggatgtgcgccgtggcgcagaatttcttccaggaattcggggatgacctgcatcgtctgattttcgggatagaagagaaagcgtataagaaccgcatcccggtgtcgaagccggaatttctgatcgggatttttaagacgctgtggttgatggaggtattcggggacgtacggccccggtatctgatcggttttatgtcggagacgttcgatctgggcctggcggagtcttccatacggaccatctggtatgacaaatgtgggatgtatgaccaattgaggcctgttttgcaggaattttttcggaatttgtataggaaataacgtgtaaacccgcttgcaatgcgccgcgccggcttttttatccgacatttttgggtattacaaaacgcccctttcctgtcgtacctttgcccatgccgattgaaaagggcgcaaattaatgagcttatatatatattaatatatttattctaagatgtaggattgaaccgaaactgacggaaaacctctacaagtagctgaaaataaattgtttatattgtgctattgactgcaccgtttttatttggggtaaaaatgtttaattttaaatccgttcattatgaaaaaggatatgacgttttcggccgattttgcaagatgcggctatacgaaagtttcccggcaggccatgcagattgcttttacgccgggagacaagtgtgaaaaagaggcaaaggtgctcctgtgcatattgggttttgcctatttcaaaaaaggagaagtctcctttcatttcaaagactatgcttgtgaacgaggcgagtggatcacctcttattcggaactggcacggcgtacggggttgatacgccgggcggcagtcacggctgtcggacatcttgtcgaggcaggatggttgacggtcacggcggtgggcaggatgacgaagttcaccttgaccttctatgacgcgcctccccagcccgacggccacggctctccgcaggggggcggcggcgacggtttgtcgcttgcgacagccctctacatgtaccagaacgggacggtctataacaccggggagactgtctgatggggttgaatgccgtacaatcgtatccggcggagcgggtcttggtggccgctctgctgggacgtcccgcctctttccacgaattgggcggacgggtgacggaagagatgtttaccgaaccggggctgcgcctggtgttccgtgccttcgctgggctggcttcgcgcggcgaacggatcgacatggcgacggtcgaggcggagatgttccggctcgatcaccggctttatggcgagctgaacggagtctctttcctaagcgccatgttgcaggcggtgcgcaacgacagccacatccacgaatatgtgcgtctggtacagcgcgaatggatgttgcgcggctgtgtggcgagcctgaacaaacgcggcctggaggcgcagcagccggatgtcgacgtgatgaagctcctcgccggtgtcacggacgacatggacggcttgcgtgaacatgcctccggaggcgtggatgtccggatggcggccgaggtggcacgcgaagtcctggcgcgttcgttccgtaatcaggaggcacgcgaaaaaggggaacatatacaggtgcgtaccgggttcgacgaactggacgacttgacgggcggcctttaccggggcgaactggcggtgctctccgggcggccttcgatgggaaagacggcggtggctttgcacatggcgcttcaggcggcgcgtgcggggcggaatacgctttatttcagcatcgagatgagcgaggaggaggtgacggaacgtatcctttcgatgctgagcggcgtggaggccggcaagatccgtttcaaggggacgaaccgcgaggagcgtgcgttgttggagaaagcggcggctgagctggcggggttgccgttgaggatcgtctattgcggttcgctcgccatcgacgagatccgtgccgtgctgatgacgcgcaaggcacgccgggagctggacatcttcttcatcgactatctgaacctgatccatatcccttacacgcggggcagccgcaacgagacgaccgatctggccctgggcgatgtggtgcggaaggtgaagctgatggcggtcgagctggatgtgcctgccgttctgttggcgcagatgaaccgcgacagcgaccggcgcctggctccttatctgccgatcttgagcgacctgcgtaactccggcgcgatcgagcaggtggcggaccaggtgatcttcgtctaccgggccgagaaatacggcatcttgtacgacaaggatacgaaagaggacctgcggggcgtgggctatcttctggtcgccaagaaccgtaacggggcgaccggacgggcgcgtttccgctacaatgtttcgatgacacggttcctgtcttatgaaaaccggttgttatgagaggcgattcgttgaaagagagaatccttcgggtggccacgatcgaggaagtggtggctgcctatgtgccgttgcagcgcagcggtgcgggatatgtcggcttgtgtcctttccatgcagacaagcatccttcgttgcacgtccatccgggaaaacagtttttcaaatgtttcgcttgcggcgaaggcggagacttgttcgctttcgtgcagaagatcgagggatgttcgtttacggaagcgatgggaaagctggcgaaacggtattcgattgacagtagggagtggacagtagacaattatgcagggaagaagaaaaggacggacggaaaggggacagccggctccccggacaaaacggcaaatgaaaacagtgacgaccaattgtctgttgtcaattctcaattgtccattcggacgattggcgccgccaatcgtctgttcgcctccctgttgcagccttacgtgccggaagacgaggctttgagggagacgtaccgccttttcggggtggggatcgctcctccggaagtgccggcggattaccggaagatgcggtcgcggctgatcttcccgatccgggacgagaagggagggctggtggcgtttgcggcccgcaggcggacggatggggaggagggagccaagtatgtcaactcgccggccagtccggtctatagcaagagccgggtgctttatgcgctggaccgggcgggggaggcgatacgggagaggcggttcgtcttcgtcaccgaaggctacaaggacgccctggcgatgcatgccgccggatttacgaatacggtggcgctctgcggggtggctttcactgccgggcatctccggttgctggcgggatatacgcagcggatcgtcctgctgctggatgccgacagggccggggaggcgtcgatggaaaagatcgtggcgatgctttcgtgcgggacagacccggaaggggagcggttggagccggcctgtttgttcgaagtgagccggatgcagcttccttacggggaggacccggacagcctgctgcatggatcgggcttcgtctctttccgccgtcagatcaccgcttccctccatctggccttgctggaaacctacgaacaccgcctgcttcggcagattgcaaagaccgtgagcgatttatctctctgtctttcatgtgaagaccgaatatctttgttatctttgctcgcaaaacagaaatcccgcctctcacgtgtgacgatgcggctggggaggaatgtggtggtgtaaacaaccggtcaccgatgaatttgccggagtcattcgcgggagacggattgttaagttaaatggaacatagtcataattatatgcagttacaacctacattttcaatcataacgattacctataatgccgtgcgcctggtggagcagacgttgttgaacgtgttgagccagtcctatccgaacatcgaatatatcgtgatagacggcggttcgacagacggaacggcagatatcatcagacggtatgaatcggggctggcctattgggtgagcgagccggacaaggggatatacgatgccatgaacaaggggcttcaaaaggcgacgggcgattatgtctggttcatcaacgccggcgataccctctgttcgtccgatacggtccagtcggtcgtttccaggttgcagaagaggaaggctttgccggatatcatctatggggaaacgaatatcgtggacgaggaaaggcggtcgctgggactacgccgcctcagggcgccgcggaagctctcgtggaagagtttccggatggggatgttggtttgccaccagtcgttcataccaaaacgtgcgattgccccgtcgtatgatttgcaatatcgctattcggccgatttcgactggtgtatccgttgcatgaagcaggcccgttcattctgtaacacgcaccttaccctgtccgacttcctggacggcgggacgagcacgacgcaaagaaaagcatccttgcgggagagatatgcgattatgtgcaaatattatggtacttttgttacggttttgctccacggctggttcgccatccgtttttatacggcgaagtgcctgaaggggcgggtgtaaagaatatgaattttaatgagacatatatgaaggatttgctgaagcaatgggggaaacatgttgttgccctgattttgtttttgggactggtgatgacctatttttcaccggcggtgtttgatgggaaagtaatcatgcagggcgataatatcaaggcgaccggaatgggatcaagccagatggatcaatacgccgagacggcacagccgggtgagttcagtgtctggtcggatgcgatgttcggagggatgccgtatgtgacaggatatgggcaggccgcaccgagtatgccttcttattcgattgtggatggttggttgaaaaaggtgggatatggcgatgctgcgatggtttttaccgggttagtgtgtttctacctgctgatgtgcgtcatgggagtaaactggtggctcgcgattgccggggcattcgcttttgcattcgcatcctataatatcattattatcgaggcggggcatatcgtgaaagcctatgtgatcggttatatgccggtgacgttggccggtatggctttgcttttcaggcgctcctatctgtggggagccgtcttgttcctgttgggggtagccttatccttggcgaacgggcatatccagatcacctattatctggtcctgctttgtctgctgatctatgtaggatatgcagtcagaaagatcaaggagaaagcctatggcgaatggttgaagacctccctgattatggccgcttgcgtcgtattggccgtattgcctaatgcgcaggggatgtattccaattgggatctggggcagcactccatccgtggcgcttcggagctgacgccgaaaccggatgcttcgggcaaagtggagaaggcttccaccggcttggataaggattatgcttttcaatggagttacggctggaaagagttgatgaccgttcttgtgccgaatgtatatggcggtgggtcgggaggaacgttggacagctcttccgagttatacaaggagttgaagaaaaacggggcccaggtggggaaagaagtacagacctatacctattggggagataagatattcacttccgggccggtctatttcggggcgttggtctgcttcctgttcgtcttggggatgttcgtgatccggaacccgatgaaatggtggctgctggctggatcggtgttcctgacattccttgcgttgggacgtaatttcgattctttcaacgacctgatgttccattatctgcctttgtacaataagttccgtacggtcgagatggcgttggtgataccgggactggtatttccgatcgtcgctatttgggggttgcgggaaatcttggccgaaaaagtggaggaggctcgtttgaaaaaaggattcctttgggctttggggctgaccggaggactttgtgtgatcctttggctgatgccttccttgttgttggatttccggtctgcatacgatgcgcagttccagaaccaggttccggagtggtattacacggccttgttgatggaccgtgcttcgctggcttcggccgatgcgttgcggtctttgatttttatcctgttgggagccgggttgcttgtctggttctggaaggcgaagaacaagaagactgcggcgactttcgtaagtgcaggggtggcagtccttattttgattgatctttggacggtggatcgtcgttatctgaatgacagtaatttcgtcaagcagcagccggcggagatgtacaaggaaacagttgccgacaaggcgattctgcaggatacgggttcgattttccgtgtgttgaacatcaataacccgtggcaggaaacgaatacttcctatttccatcattctatcggagggtatcatgccgtcaagctacgccgttaccaggagctgatcgaccatcggctggacggtgagttgcgtgggattatcggtgctttgcagaaggcacagacggccgaagacgtgatgtctgcgttggcagcctgtcctaccttgaatatgctgaatacccgctatgtcatctataaccccgaacagcaaccgttgaagaatccgtatgcattcgggaatgcctggtttgtagacaagctggatatggtggacaatgcggatgccgagatagaagccttgaatacgatcgatccgttgagaaccgctgtggttgataagcgtttccaagaagatttggaaggatttgtgccgcagaaagattcaaccgcaacgatcgtgttggaagaataccgtccgaaccgcctgacctataagagtaaagcggataaggaacaattggcagtcttctccgaagtatattaccagccgggttggaaggctacggtcgatggcaaggaagtgcctcatttccgtgcggactggatattgcgtggcatgcgtgttccggcaggcgaacatacgatcgtattcgagttccgtccgtccggttatgtgacggctgcatacgtttcttcctacagttcgttcctgatcttgttattgctgatcgctgcgatcggttggtcgggatggaaatattggaaaaagagtaaaaattgatattgttcaaacgtatcacttttgacggtcgtcgtggtaataaagacgaccgtctttatcccgatgaagtcaatgttcgtatgggatgaagacggttgtcttgacaatgacttttgggagtctttttatttgtagaacgtcttttggaatgccgaaaactcttcctttttcaaaaccagcctgttccaggcagcatctaaaaatccacaaccgtatcctgacagttggataaaggaggcgataatcgacaggaagccgattttgatgcttttattctgaatcgaagaatccgcaaagataagcaaacagaaaagtccgagcggcaataaactccaagtgcagaagaggcttccgaccaggaaaaagagtactcctaatgtaaaggccgccggcaatagatgtaccagtttaagcgagtccggatatttcttgtacaaattgatacgggcgatgccggaattataaacctggcggaagaacttgtgccaatccgtacgtcttttgtgatatacccaggcggagggaaacaggcatactttgttgccgttcttgaacaggcggatactgaaatcgatatcttccccgaagcgcatgggggagaagccgcctaacgcttcgtaggtgcttttccggattcccatgttgaagctacgggggtagaacttatccatcttcttttttccgccacgaatgccgcctgtcgtaaagaaggaggtcatggagtagttgatggccttctgcacgtccgtaaagctgtcagaagccttgtccggccctccgaaagcgtccgccccggtttccttcagttccttgtttaccgatttgatgtagtcgggaggcaggatgcaatctgaatcgagaacgatcaggtaatcgcctttgctctgcttcgccccgtagttacgggcattgcccggaccgccattaggaatataggaataggaaacatccaacttatctttgaaagcttcgactacatgctggcaagtatccttcgagccgtcttctacgatgacgacttcgaagtttgtttcactctgccgtgtaaggctgtccaataactcctctacctcgttgggacggttgtagacagggatgataagggataaatgggatgttgccatatttatgaattctttaagatgtaatatccgcaggttgtatagaagttacggatatacgggatattcaggaatctccatagtctgcggggacggagattgaattttgtttcgtaattagggttgatgaaatagaggacttcttcgactatccggtatttttctttgtgcacgatcgagagaaaacgttccaatgaaatgccggtatctttgatttccaaaagtcctccgggattgacattcccccattccagcacttttttatatacgggacggggcaatagatggaaccagggcaaatggcttaggagcttgttgttgcaaatctgctggtgacctccgaatggattttgccagggtggaaaggctacgaaaataataccgtgaggacttaagaacctctttataaaaggcaagaataattcttggttggggatgtgttctatcacatcccggatgatgataatgtcgaacttgttgtgcagttcggttactttgtagatatcctcgcagatcaatgtcaagtttctgttgttgggatgtacgctgtagatttcttttgcgattgcaatctggcctccgttgatgtctatgccggtcacttggcaaccgagatccagaaagggctttatgtttcctccttccccgcaaccgatttcgagaatgtgggaatctgccgtaatcggtttatgcttttcaatgaaaggtattacatatttttgtgtcgtaatactttgttcgttgaaatatagttgtctgtcagcgtgtcttttttgcatatctacaaaataaaaaagagggtgtgccgaaagccttcatacttttgagcacaccctcagatatattaatatctgtaatgttcggccttataaggtccttcgaccggtacgccgatgtaatcggcttgcttctgtgtcaacttggacagtttgacgccgatgcgctccaggtggaggcgggcaacttcttcgtccaaacgtttcggcaggcggtagacacctatttcgtaaggcattgtccacaaatccatctgggccaagacttgatttgtgaaggagttgctcattacgaaagaaggatggcctgtcgcgcaacccaagttcaccaagcggccttctgccaacaggaagatagagttgcctgtcgggaatgtgtacttgtcaacctgcggtttgatgttggtgtgctggatgttcggatagttcaccagcttgtcgacctggatttcgttgtcgaaatggccgatgttgcaaacgatggcctggtctttcatctgggccatatgttcgatggtgatgatgtcgcagttaccggtggtcgtaacgaaaacgttgccttccttgacggcttcttccattgtcgtcacttcgaagccttccatggcggcttgcagggcgcaaatcggatcgatctccgtgatcaggacacgggctccgtaagagcgcatggagtgggcacagcctttccctacgtcgccatatccagctactaccacgactttgccggcgatcatcacgtcggtagcgcgcttgatgccgtcggccagtgattcgcggcaaccgtacaggttgtcgaatttcgatttcgtaacggagtcgttgacattgatggccggaaccagcagttcacctttttccatcatttggtacaggcggtgtacgccggtagtcgtttcttcggagacacctttcatttcggcgatcgtgcggtgccaacgggtattgtcttcagccaggatacggtttaaggtatccaggatgacctgttcttcgtgattgccacctttgcggttgatcgtttcggcatcgttctctgcccggtaacccatatgaaccagcagggatgcgtcgccaccgtcatccacaatcatgtgcggacctttgccgtcggggaaacggagtgccatgtcggtacaccaccagtattcttccagtgtttcacccttccaggcgaaaacgggaacaccatcggcagcgatggctgcggcagcgtggtcctgtgtagagaagatgttgcagcttgcccagcgaacatctgctcccaacgcaactaatgtttcgattaacactgcggtctgaatcgtcatgtgcagtgagccggtgatacgagctcctttcagaggtttctgatcggcgtacttcttgcgaagtgccataagtcccggcatttcgtgttcggcgatctcgatttctttacgaccgaattcagccaaactcatatctgccactttataaggcagattagttggaaataattgtgacataaattgatactaaaatgttaatgttgcaaaggtacgaaaaaaaatcataccggagtgattcctcggtcggccaataatttcaagcccaagtctttcagtttgaacttctggatctttccgctaccggtcatggggaaggtgtcgacgaagaatatatacttcgggatcttatgccgggcgatctttccgcggcagaagtccttgacgatatcttccgtcatggtgacgccttcgtgcaggatgataaaggctcccacttcctctccgtatttcttggatgggacggcagcgacctgtacatctttcaccccttccaggtgataaaggaattcctccagttcacgaggatagatattctctcctccccggataatcatgtccttgatgcgtccggtgatgcggtagttgccatgttcgtctttcacgcccaggtcgccactgtgcaggaagccgtctttgtcgatgacctcggccgtggctgccgggttgttgtaatagcctttcatggtgttgtacccccggttgcacatttcaccttgtacgcctaccggacattcttcgcccgtttccggatcgatcacgcggacttcggtaaattcgtagtcacggcccaccgtattgtagcggacttccgccggatcgtcgatgcgcgaatgtgtcatgccgggcgatgcttccgtcaacccgtatacgctggtcacgcgcatgaacattttttcttccacctgcttcatcaactccacagggcaaagggagcctgccatgatgccggtgcggagggaggtcaggtcgaacatgctgaacatcgggtgattgagctcggctatgaacatggtcggcacgccgtaaagggccgtgcaccgttccttgtggatggaggcgagtacgaccagcggatcgaatttttcgaccatgacttgtgtgcatccatgcgtcaagacgttcatggaggcgagcacgacaccgaagcagtggaacagagggacgcagcagcatagtttgtcgtctgccgtgaatttcatgtgttctcctgtcaacagcccgttgttggcaatgttatagtgcgtcagcatgacccctttggggaagccggtcgtgccggatgtatattgcatgttcacgacgtcgtgcggggtcaccagctttttggcttccaacagtgtctcgtcactgacgttttcgcctaaaagcagcagttcgggagtgttgtacattcctctgtatttctcctgcccgatgtaaactacattcttcagaaccgggaaacgtttgcttttcaggtagccacgttgtgattccttcagttcgggcaacatggtatataccatgtcgacataacttccgtcgaacacgccgtcggtaatgcataatgtatggatatccgcgttttcgaccaggaattccagttcgctctgcttgtagttggtattgacggtaacggccactgctccgatcttggcggcagcatacaggaatgtaagccagtcggggacattggtcgcccagatgccgacatgcgtgccatgtttgatcccgatcgaaagcatgcctttcgccatccggtctacacgttcgttgaattccttccaggtgaaacggaggtcgcggtcggaatataccagatattccttgtcgggtgtcgtctcggcccaatgttccatccactggccgagcgtcctgtcttgtaattgtatttccatagagacggcagattaatagggggtgtagatgactccgaggattttcgccgtattgtcggcggcggcatgtacgtggtgggcgacgatggaatcgtagtagatgctgtcgccttcttccaggatataggtattcttgccatagttgatttcgaggacgccttccagtacatagatgaattcttccccttcgtgtgtggagagtacgaaatccaccccgtcttcactcggagcgacatcgatcaggaacggttccatatggcggcccgacttgtcttgtgacagtgaatggtattccatgtgcttgcgtgccttgctgtcgttgttgctgaagcctatgctgttcgtgtcattgctgtcttttttgcggcagatgacaggacccagttctgcctggtcatccaggaatgtccccagacgtacgcctaatacgcgggctatcttgattagcggggcgagagacggaaagtctatattgccctcgatacgttctatttgttcgatgctcagacctgagcgttcggatacttcctgggtggaaagttgtttggattcgcggatgcttttgattttagctcctatgattttgttgtttcccatgagcattatatgtttattgtttattgaatcttttaatttgtaacagaacggcgcaaaattacattaaattttcattaaacaaatgcgtttagtgaaagaaaaaaggatgatctccgtagagaccatccttttgaacttcttgcgaagaaattgtttcttactttctgataccaagctctttgatgatagcacgatatctttcgatatcaaccttgatcaggtaatccagtaaacgacgacgtttacctaccaacattttcagagctctttcagagctatggtctttgtgattagccttcaagtgttcagtcaaatgtgcgatacgaactgtgaacagtgcgatctggctttctgcagaacctgtgttcgttgcagatttaccatacttttcgaaaatctcttttttctttgctgaatctaaaaacatgattcttgtgtactttaataaattaatactatgttatctaagcggggacaaaggtagggattcatttttgattgacaaatctttttatgtatctttttttattttgaagtgtcaatgtcatatacttctcgcaaatttattgtaattttgcggccaataaattagttttcaatgcaaaagattagaaacatcgcgattatcgcgcacgtagaccacggtaagacaacgctcgtggataagatgttattagctggtaagcttttccgtgaaggacaggcagagccggatcagttcctggacaataatgacctggaacgcgaacgagggattacgatccttgccaaaaatgtatctattaattataaaggttataaaatcaacattatcgatactccgggacacgccgacttcggaggtgaagtggaacgcgtattgaacatggctgacggttgcttgttgctggtcgatgcttttgaaggaccgatgcctcagactcgtttcgtgcttcagaaggctatccagttaggcttgaaaccgattgtggtcattaataaggtagacaagccgaattgtcgtccggaagaggtgcaggaaatggtgttcgacctgatgttcagtcttgatgcaacggaggaacagctcgacttcccgacgatctacggttctgccaagcagggttggatgtcggaagattggaaagagccgaaggaagatattaccgctttgctggatgctatcatccagtatattccggaacccgaggtattggaaggctcttcccagatgttgattacttcgttggactattccaagtatgtaggccgtatcgctgtggggcgcgtgcatcgtggcgaactgcgcgaagggcaggagatcatgctttgcaagcgtgatggctcgatggtgaaatcgaagatcaaggaaatcgatgtgttcgaaggactggggcgtacgaaagtagatgctgtccagtccggcgatatctgtgcgattatcggtgtggaaggttttgaaatcggtgagacgattgccgatgccaatgatccggaaccgctgccgacgatcgctatcgacgaaccgacgatgtctatgttgtttacgatcaataactctccgttcttcgggaaagatggcaagtttgtgacatctcgccatatctatgaacgtttgatgaaagagttggacaagaaccttgccttgcgagtggttccgacagattctgccgattcttggttggtgtatggacgcggcgttctccacttgtctgtcctgatcgaaaccatgcgtcgtgaaggttacgagttgcaggttggtcagccgcaggtcattatcaaggaaatcgatggccagaagtgtgaaccggttgaacagttgacagtcaatctgccggaagaatgttccagccgtatcatcgatatggtaaccaaacgtaagggtgaaatgacgatgatggaaagcaagaacgaccgtatgcatctggaattcacgattccttctcgtggtattatcggtttgaataatgctgttttgactgcatcagctggtgaagcgatcatggcgcaccgtttcctcgaataccaaccgtggaaaggtgagatcgaacgccgtacgaatggttctatcatcgcgatggaaacaggtactgcctatgcttatgctttgaataacttgcaatcccgtggacgtttctttattgctccaggcgatgaggtgtatgccggacaggttgttggcgagcatacgaaagacaatgacttggtggttaacgtgacgaagtcgaagaagctgacgaatatgcgtgcttccggttcggatgataaagtgtctttggctcctcctacggtgttcagcctggaagatgctttggaatatatcaaaggcgatgaatatgtagaaatcaccccgaacagcatgcgtatgcgtaaaatcatccttgacgaacttgaacgtaagcgccagggaagataaaagctatcacaacataatcgcgccgataatgcaaatcatacttggacttgcgttatcggctttttttgttttaattccaaatacatgcactactaatcctatttatatcgggagggcagtttgtaaatcgtattcaaacgtggtacggttgtcgattgtcaaattaataatgaataatatcaaaaaataaggggaggcatttgcgtatactgattatttttgtcctattaagtaaaaaactttaaaggaaaatgaagaaaaaagtatatacagcgttcatatgcctttgttgtgctgtggtgtctctctttgctcaggagcgtgtagtagaattaacgaatccgaacgaaagctgtacgagtattgctgctggcaaattggcgacgactgatggttcggtcatgacatcgcagacgtgtgacgggacttctcgtacttggatggaggttgtgcctgcccaaaactggccggacaccgcaaaactcgatctttattgggatctccgtcatacggaaagcaaaaacgaccgtttgggtgtgaaactgaaaggttctatcccacaggttccttatacatttgcttatctgaatactggttatccttgtatgaacgagaaacagctggcgatgggagaaacgactatcgtgggacgtaaggagctgcgtaatcccaaaggcttgttccatattgaggatttgcaggggattgctttgcaacgttgcagtacggcacgcgaggcggtcttgctgatgggacgtttggcagaacaatatggctatcgtgatggaggggaatgcctgacggttgccgataagagggaactctggtttttcgagattacgggtgcaggttcggaagatatgggggctttatgggttgcccggcgcataccggacgaccatgtgacggtttcggccaatacacctcgtatttccgatgtcgatttcggggataaggataattatatgtatagtgaaggactgaaggagaaagcacggaagttagggtattgggacgggaaagagcctttcaagttctggaaagtaatccatgaaacggggaagaagccttttaccatccgggatttttttgttttgaaaacgctggctccttctttgaacctgacgatggacatggaggagttacctttgtctgtcaagcccgaacagaatgtttctttggcggatatgaaccgtttgctgcgtgaaacatatgagggaacagaatgggatatgacaaaagacatgatggttacgaagaaaatcaaggataaagatggaaccgagcgtgatacgatatataaaagcccgttggcacaaaactggatgacgaatgatatgtttgaattcctgaatgcacagcgaggtgaaaagaagatagagaaacagcggacgatatcggttgtctggtgtgcttattcgtttgtgatccagtgccgagattggttaccggacgaggttggaggcgtttgttggtggtcggaagataatccgggtgaaagtccccgtgtcccgttatttgccggaatgacggatgtccctgaaagctttaaggtatgcgggcataaacgatatcgtcctgatgccgccctttggacctatcgacgtacaaaccgtttggcgcaagtgagttgggggcatggtcgtaaattaatcgagccagccgtcctctctttcgagcagaaggctgccgacgaaatgcctctgatagaaaacaaggtatcggtccttattcgggaaggcaagaaagatgaagcccaagcttatcttacccgttattcctttgattttatctattcgactttgcgttgttgggaggaaatggaaggacagctatggcataagtttggacggggtttctgattgagggcttcttttagtgtgagtttttcttggctttttcccgctgcttttcgatttcttttcggtaggagagtgggtttatgcctgttttgctcctgaaaaagtaagagaaatagtcggccgattcaaaattgagcttcattgcgatgtcttggatcgacatttccgtactgctcagtaaatctttgatcttgctgagcttcagttgcagcatgtattgatggggagcgatcccagtgtattgcttgaatgatttcctgaaattggaatagctcatgttgatggattcggcgatatcttccggtgtaaacttgtcgtaaatgttttcccgcatcaatacgcatgcttcctgtatcttctgcatagaaaccggtccacagtcctgatttttgttgatcgaatagatcaagccgatcgtatgcatcgtaattcccgccaaaacagcttggaacccggatttctgtgccctggcacagtcaagcatttccccgaaatgcttgacgatttggtcattcatgccgatatgaaatatgggatttgcgcgattaataattccgtttaataatttttcaaaataatcaccttgaaaggttacgtaatattcatcccaacctatattggcgataggttggtagctatgccattgtccggggaaaataaagaatgcgtctccttttgatattttcttttcaaagcagttgatggaagcaaaagttccttctccttttacaatatataccagggcgaactcgtcaataattctgccccggtcgggattaaatgtatatccgattgggtgacctttaaggggataactgccttttggatcaatagactgaaatcctatgccgttaatagacattccccagatgttctcatcattgtttgtcggtaagtactttatgacattatgtttactgcgatcaaaatccatttggtgattattttgagtatttcagaataaaatgtttctcgcttgagagattacatttatctctgtttacaaagatattaaatttattacatctgtcaaaaagcaagggaaaaatatcattttttcatgattataaagataataaaggcagacatttgtgaaaataaatatcgtttaacctaataagtttggagattatgagaaatcgaattctatttttgctatgtttcctatgtataggattgcaagcatttgcccagatttctatttcaggaaaagtggttgatgcaggagggcttgaacttccaggcgtaaatgtgatggtaaagggaacaactatcggtacattaaccgatggtgatggaaggtttacgattccagatgttccgggtagcagtaatgccgtattggtattttcttatgtcggtttccagacacaagaaataaaagtaggaaataccaaaaatttaactgtgaaattgcaggaagataatatggcattggatgaggttgtggtggttggttatggtacatcccgtaaaaaagatttggcaggctctatttctagtgttaaattggatgattctccgttgacgcagttggcaaacgtgaatgctttagttgcgttgtcaagcaagattccgggttttaattattccccgacaacagatgccggtggtgataatacggcttcaatgacgattcgtggtatgaattctattattacaggtccttcggaggcaagcttgaacaagccgttgttggttgtcgatggttctatctttaatggtagtatcaacgaaattgccatgacggatgttgaatccattgatgttctgaaagatgccagttctgctgccatctacggttcacgttctgcaaatggtgtaattattattacaacaaagcgtggtcgttcttccaaacctacggttaatttggatgcttattacggaattcagagttggacaagaaagccgcagatggtaacggatcaaaatgaatttttgaatcgtcgtcgtgaagcgatgattgctgccggttcgattgatccgagcgtaggtttggaccccgcacagctattgaatgctgaggaactggaagtttacaatgctggtggttgggttgattggattgatgaggtctctcaaaatgcgcagattcagaattataatctgagtatttcaggaaatgcttccgataaagtgaattattatttgtcggccggttatatgaaacaggatggtctgattgttggcgatgactataaaaagctgactttcatggctaaaatggacgcaaaagttacagactggttgacggtcggtatgcgcgcatcttattataatgcctctaatcctggtcagatcgcaaatattcagtctgcaacatggctgtcgccctatagccataagtatgtacgttatgatggctatactgattggtatgaaagatatgcaaatggaaatgtcgccagcccgttttggagttcttccgaaactacttcctatttgtggacagatcgtgagaagaaatatgataacctaaatggaacaggatttgtacagatcgatttcccatttgtaaaaggtctgagctataagtttaccatgaatgctgtaaaaaatacgaacaatgttgatatgtttgtaaatccccagtatttcttggatacgagaaaagttgaggaattggctgatccgtataagtatacggcggaggcaaatggtaaatcggagattaaccagacttatgcgtggacaatggacaatgtgttcacttatacgaaagatttcggaaagaatcatttggatgcaatgctcggttatacgcgtgacgccactcatcagaatcagttgaagactgcttatagtggtttcaaactgccgactgtattaggctcgtacggacaaaatttggcaacgactcagcagattaacaagacattgaaggaatggcagaatgtcggttatatggctcgtgtcaattataactatgcaaacaagtattatctgacggcgaacttccgtcgtgatggtttctctggatttgcaaaaggtagtaaatgggctaacttcccaggtgtgtctgcagcttggacattgtcccaggaagattttatgcagaatgtaattccgggattgagtttcttaaagctgagaggatcctatggtttgaccggtaatcagagtatcgaagcctatgctacattggctacagtcgcttccggttatacttggtatgatgcatcttctttgtatatctatcagaattcgttggcaaatgaggaattgacttgggcgacaactaaaacaggaaacttcggtcttgatttcggattcttggacggacgcatttctggttctatcgatgtttataaatcaaagacaaatgatatgttgttgaaccgttcattgccttatatgactggtttctcggaagcaaagtttaatgcgggtgaggtgatgaaccgcggtgtcgaactatctttgaatacggttaatataaatggagacggtaaagataatttccgttgggaaagcggattgactttttatcgtaacaagaacaagattgttcacctttttggcaaggatgctaatggcaaggaagcgaacgatacgggtaatgcgacaacaaatggttacgaaactgctcgtgcgttggttataggcgagtcgatcaatgctgcatgggatttgaaaatgttaggtatcttccaatctcaggctgagattgatagctatgtagacgcgaatggtaataagattcagccggatgctgtacctggtgacatcaagttcctggattataacggtgatggtaagatcagtacggatgaccgtcactgtattggagatatggacccattgttcacgatcaattttagcaatacgttaagttggaagaacttctctttgtattttaacttccgttgggatgcaggtaacagttctcattttatcggtagtgatccgtttggtaattaccataatacggcaacgacatcaggtgctcagttgaaagttgctccatggagcgaaaataatccaacaaacgagcatccacgcttgggctatgtaaatacttattcctattatttttggtcacaacgtcagtatctgaaactgaaagatttgagtctttcctatactttcgatcagccgtgggtaaagaaagccaatattcagaatttgcgtctttatctgagtggtacggacttattcacaattaccggctggtctggtctggatcctgaaacaggtggtacgattgctgccggtcctggtagtagccgttatggaagcaagcctgcttatcggacacttacaattggtgctaatataacattctaaaaattgaacggatatgaaaattaaaaatatattgttaggaacggttgttggctctttgtccctatgtggattggttagctgtgacaatgattttctagaagaaaagtcatatgaatatacgtcttcgacttcgtataatacacctgaggaattggacatggcaatcggttttctgcatgggcgcatccagtatttgttttttggtgtatggggtaatcataactattttatgacaggcatgggactggacacctttgctgcaacagaccaaaattatattacaagtaactggaagacatttactcctgacgaaccggggtattcacgtcactggtacgataatttgtgtcaaataatccaacaatcgaatataattatcgatgctatcgatactcgggatatcaaatgggatagcgagactcaaagaaatgagattagggcggaagcgatctttttccgtgcgtgggctcatcgttgtttagccggtatgtacggtgacactcctattatattggaaccggctcgctctgcaaaagtagattatgaacgttctccccgtatggatgtttggaaacagtgtgcggcggattttgaatgggcagctcagaatttaccgttgacaacgacgaaaaatggccgtatcgtaaaagcggctgcagaccatatgttagctgaaatgtctatctgtatcggtgactatgataaggcgattgcggcggcaaaacgtgtaattgatggaacagacggagattaccatctgatgaccgaacgtttcggaacacgggctggtgaggcaacggaccgttatggcaatcctcatagctcttattgggatctgttccgtatgggtaattttaattatcaggaaggaaataaagaagcaatctgggtagctcaatatgattatgaaggacgcatcagtaatactggtggcggtggtgttgtaagttggggatctgctccagcaaaatgccatatcgaacaggcttttgtctctaatttctataatgtggacaagaaaaggactttgtcaaatggtgacgttattcagatatttggttggggggctgtaacttttacaaatagtaaagcggattatgatgcgaataagaataagtcgaatgtagcaaccgactcgacggggtatggtggcggtggaacttgccatccgaccgaatggttcttaggtgatctatggaataattgtggaagtgatgtccgtggctctgaagagatgattcaacgtaatctatatcagtcgggaggtaagccatggaggcaggccattgatgaggcgaaggctttatatgaatctaaaaaagcgtccggtgatccggatgccgatctttataaaatcacggctaatgatacggtcactcttttcccgcgtatctggaagttcggtacggataagcatgtggatggcgactatcgccgatatgatccggattggtatgtaattcgtctggctgaaacttatctgttgttggcagaagcatatttgaataaaggagataaagcaagtgcggcagatgctatcaatgttgttcgtgcccgtgccaaagctccattgtgtacggctgctgatgtgacgattgactatattctggatgagcgtgcccgtgaattgtatggtgaagaacatcgtgcagtaacactctctcgtctgtcgacaaaagaaaatccggtgttggtacagcgtacccgcaaatatggatatcgtttcccggcagctacaaacgaattgaaggatgcaggtcccaatattcaggattatcaatggcaatatccaataccattacaggtaatcgaagctaactctggggctaacttcccgcagaatgaaggttattgattaaatctatctgtataaaaatagaaagcctggatgcagaaatgcttccgggcttttattttgtgtcgagtttaggcggtacggataaatccataataccaataggtgtttccgtatttttgccggagtacatgatccgtattcggacgctgtgacatcagtacgccgaagtcttcgaaagccagcctgcaggttggggtgactgggtagttgcgggtggcatccaaatgaggaaacatgaggtcgaccactaacagagcttcctgataatgaatcggtatcgcttcaccttgtggaaagtattgccggaataaattatagaagcctttcaagtctttatccaaaaggacgccgcataacaaatagtcgagtgctttacggttggttgtatcggcttttatcgcttgtgtcagaagaatgaggggggaagatgcgtcgataatgaaatcttccttgtatgcttctttggaagttgttagggacttggagatccgttcggttcgttcttttatccattgattgtgacaggtggaggtttgtaagatgtccatatatttctgggccaggggaagatttccggattctgtttgccaatcaatcaatcttctgagccgggagaaagaaagaccttgtggagacatggcattggcttgtgcaagttggtggagagcttcgtgtttcagtccgagagcataggcgaaaaggctgttaaaattggctccgcccaattcgtttgccggaaaataaatgcggtctgctgactgtactggatagtggaagagttgctccggcaggatacctttttcattaagggcaagcatcaggtaaggatgatagtaggcttcgctgctgttactggtatggatcgtttgtagtacccgatcccattgttgttcttccgcataccgttgtacagccaggcgtttctccctttcccggttgggagaagaataaatgctgtaacaactgaatgcgattaagagaagggggaatgcgatagagatatagcggttttcttttctgccggagaggaaagcagagcagagcggaattaggaacaaggcatagtatacgtaaatatatcgcattccatattcaggattaatgaatgtgtacaactgattgaccggggtgtaaaaaacaaagttttgccataacagaggccatacggcaacaagtaccagatttataaccggtaacatagggaagcctttttgtttgaagaaaattcgttcgaaaacaattccatacagatacaataaaagtaagcagttttccggtaaaagaagatataagaaaggaatagcgatcaaagcgctggtatagcgtattactttgttctggatgaaaagataaaaaacgagtgttaaaaggaatagattgtattgtaatagtgcggataagttccaggcatattgatagatgcagaacatgatgatcggtacggtgattatccatccgtgcagtgctgctttccattgccttaagtagaggaggaggatgactgcggtaatcaaaagtaaacctgtttccacgaaaagtcccagtgagagcggatggtagaactgagacaaaaagttcgttatcagactgttccatccggttggagcaagtagataaccttgcaggtagtcgtttgtcatcaggaataatccgcctgcctcctgataacgaatatattcgggatagaacatatattcgataacgagtgtataaatacttgacaggaccagaagtatgatgtttccttttttcatttttatgtacgttttaatcggttacggtatgatccagctgagatctggtgattgtgattttatccttgataaattccggaatgttgaatgatttcattcggaggttgttctcgtcaggatctttctgcgggagtaggaacggtttactgaactttccgttctcatttaggtgggcgataaagaaacgggtgtaaagcccgtctaggcgtcggctgctgaatatgatccatcttccgtttgaagaccaggagtgatagctttccacgtctgtgctgtttaagatatcggtatccacgggggcagaaccttgtaaagatatcattttcagatccgcttccttatgccagatcgggaaagttgcataatccgattcggtgaaaagcagatattggttatctggtgagatacgggggaatgaagcgcttttattgtgtgccgtatagatcgtgtcgattgtctctccgaaagaaccgttgtccgggttaaaggagacactgcaaatagagtatttaatctctttcaacctcttgggcaattgtctggcaggagctgtgcagtaatataggcgtttcccgtcaggagcccacgctggaaatgtttcgaaagatgccggaccgttgaaacggggatccgttatgactgtgttatggaccaaatcatataagaccaggtctgattccagatcgtagacttctattaggttcgggtttcggctataaaaagactgacgggtggtattggttgaaaaaatgatatatttgccagatggatgccagtggggataagttccttctttggatgatccgagttgcgataattgcactttggtaggctggttatttttaataatgattgtccctcccggagaagtccgtgcatgaaacatgaactctgtaggggaataattgcagaatgagtggcaattgacacatcctttttcattcatattgctggatatgataatatcctctttaaaacagtttaaagctctttggcggatatccatttcatgccaagattcataacccggttcgattaatcggtaggcaatataagggtcgatagagtctgttgtaatataaacaggaaaagatttgtattgtataccttccggataagattcattccatacggatatggatatatctatttgcttgccagtattatcggataacatatgttgccatttctttaagggtatatcgattttgtttttcccttcgatgctaaataatggttggttattgttggaaaaaacagcttttatatgagaggaatttctgacagtaaagtttaaaggtgcaatattgatggggatacttattcctttataatccggaaatatatccggataggtatttccgagtttagatgcgattctattttctgtacatccgatgtagagaaagaaggtcaataaagataataataattgtttcatggctcattctgtttatgatagcactctgcaaagatgtatcaaatttttaattataaatatcaaaagcatagataaaatttgtgcgagggtgaatatttttgtccattgtgaaagacacatgggaacatggattaatcttatttttgtaaataccgtattatgatgaacagatacagatttttctctctttgcctaggtttgatgtgtggactgcacttgtcggccaaagattattatgccacggatttcggtgtgaaagcggatggtaagactttgaacacgagttccattcagaaaggaatcgactttgtgaatgcacaaggtggggggcgcttggtttttactgcgggtaattatcagactgggacgatttacctgaagtcgaacgtgacactccatcttgaagaaggagcgactttattgggatcgaccaatccttgggattacgaaaaagatccgtatattcgttggatgtctatgattttcgcagtcaagcagcagaatattggtataacggggaaagggacgattaacgggcgtggttttcaaacagccaacaatatggtggactatatccagcggggtatctacgaagatccactgaaactgggccgtccgaacgagacgaaccgtccgcagaacatctatttccgtgaatgcgagaatgtgacaatcaaggatatcaccctgcgggacccggcaagctggaaccagacatacgaccagtgtaagaatctttatgtcgacggaatccacgtggatagcaaatcctattggaataatgacggtatcgatgtggtagactgtgacggcgttgtgctgaaaaactcttttatcgatgcggcggatgatgcgctttgctttaaatcgcatgatgcgaacagcatgtgtcagaacgtggttgtcgagaactgtgtgggacgttcgagtgccagtggcttgaaattcgggacggtatcgagaggtggtttccgtaacttcaaagtgaaaaacatcaagatatatgatacgtatcgttcagccataacatttgcagcagtcgatggtgctctgatcgaagacatcgaagtagatggtgttcgttccattcatacgggaaatgtgatctacctccgtatcggtgaccgttggagtgcagggaagaaaccgattatgaagaatattacgatcaagaatgtctatgccgagatcccgatggacaaaccggatgccggatataattatgaaggaccgatcgaagatcttccccgcaatatctcacccgccagcattgttggattgccggaatataagattcagaacgtgacactccagaatatcgagattgtttctcccggaggtggtaatccctactacgcttaccgtggattggcaccggccgagctggacagtattcctgaaatggcgacttcctatccggagttttcgcagtttaaggaattgccggcttggggcttctacatccgtcatgccgagggaatcacttttgataatgtgacgtttaaggctttgaaaaaagattaccgtccggctatcgtgatggatgatgccggggaggtgacattcaaggatgtccggtttatcgagccggagggcgagggaaagaaacagatattcccttataagtcaaaagtgataaaatgagagtacgatatcggactggaaggatgtataggattaaaaacaaaaaagtgagacgatatgaataaaaataaattatttgcaagtgtgataggccttttggtctttgtggcggggctttcagctaaagattaccaagtagcgatgtttggaatcaaatcggacggagtgacactcaatacccgttctatccagcgagctgtcgattatatcagtgaacagggaggcggccggcttattttttatgtgggccgttatctgactggttcaatcgaacttaagtcgaatgtgacgatccgtatcgaagagggagccgtcttggttgcagttccctccgtttatgattttaaaggggttggaggatgtaatgcgattatttacgcagacaagcaaaagaatatcggtatcggtggaaaaggtattatcgatggccgtagcatcgctgtgcgggcaagcgtggaagagcaattgcaaaaagggcatatcgaaggaaatgtatccgattatgcaccagctttgatctgcatggaaggctgcgaggatgtgaaaatcgaacaagtcaccctgcaggatgcagcgaacgtagccgaaatatataaggactgccataatgtgacagtagacagagtcgttgtgaatgccggtgcatcggaccggaaagcaatctcgatttccggctgtgacggagtgaagatgacagattgctactttaatatggcggggaatccgttggagagtgctgggacatcccgtaatctaatatttacaaattgtataacaccagacggcaaagctgtctcaagcgatcaataagaaggaggagaaaactatgcagaggagatcttttatcaaacagagtgttttatggacagccggttgtgccgtcggtagccgtatgtcgctatggggtacggttagtgcagccgatgaggtgaaggggacggttttgcgttccggtgagctatataaattgtttcgtgatccacaatccatttaccgcccgtttgtccgttggtggtggaacggagataaagtagaagcggatgaattgaaacgtgaactgcatatattgaaggaggcgggtatcggaggagtggagatcaatccggttaaatttcccggcaatgacacggacgatttgggaaagaagtcgttaccttggctgagcgacgaatggattgacatgttgaaggtgacttttgacgaggcgaagtcgcttgatatgacctgcgatctgatcgtcggttctggctggccgttcggagcggagttcctgacaggagacgagagagcggatgttgtagtgaactattccgagaagctgagtggtccgatcgactatgaagtctctcgcgacggtctgttctgtgcggccgatcctgctatcagttctccttttcttggaaagaagatggagctggtttccctgcagctggttcctgagccgtttggcagtcttgatcaggctatcgatctgatggataaagaggtagacggaacgttcaagttcaaagtgcctgatggaaaatatgtcttgtttgccttggtcaagatacgcggtttcctcgaagtgatcaatggtgctcccggtgctacgggaccggtgttgaaccatttcaacaagccggccgtgcagaagtatttgaataatatgtcggataagattcagaaccgtttgggtccgttgtccggcaatatccgttccttgtttaccgacagtatggaactggaaggatcgaactggtcgtatgatatggcggaagaattcaagaaacgccggggatatgacgtgcaaccctatctgcccttcatcctatttaaaatgggtagcatggggaatgtgttgacctatgaaccaaaggttcagtttacacccgaactggacgatacgatccagcgtgtgcgttatgattttgaatacacgaaagccgaactgctgcgcgagcgttttacacagacttacctggactggtgtaaggggctgaatgtgaaatcgcgtgcacaggcctacggacgtggtttcttcccgcttgaaagcagtctggattatgatatacccgaatgcgaatcctggacgatgacttggttgcgccaccgcttgggtgaggaaatgtcggaagaggattatcgtcgggggcgtgcctatacgatggttaataaatatgtgtcttctgctgcccacttacgtggaaagcgcttggtgagttgtgaggagatgaccaatacttataccgtgttcaatatgacattggagttgttgaagattggaggtgaccagacggctatctccggtgtgacgcattctatcttccacggtttcaactattctccgaaagaagccccgttccccggatggattcgttatggggcctattataacgaaaataacaactggtggccatattttaaatattatacagcctataaaggtcgtatggcttccgctctgcaacacggaaccatgtatgcggatattgcgatcctgcatccgatagccgatatgtggagtaccttgggaatgcagaacgagccgttccctgctactaccaatgtgaaatataagacattggtatgggaagcgatccataagaacggcagcggttgcgactatgtttccgaatcgatcatccgggatgccgagatgaaagacggttacttgtgctatggtccccgcaaatataaaactcttttcctgatcgaagtggagagtatggaaccggctaccgcgcataaattatatgattttgtggcctctggcgggcgtattttctgtatagaggcttatccgcataaatcggtcggcctgaaggatcatgacaagcatgataaggaagtgcaggaatgggtggcaaagatgaagcagatggacgggcgtttcatactgctccataaaccggaaaaagactttgtcggttggtatcagggtgtgcagaaagactatggattgacaccgtatatgacgattgaaaaacctgatccttacttgatgcagaaccgttatcagggtgataacaaagaagagatgttctttttcagttatgcacaccgctataattcgcatcagacccgtatttccttcagcaacgaggtagtaaaaggacgtcagggttgggtgtgggatctggaaacgggtgaacgataccggttgccgctggatgcagccaacagtttcctgttcgacttcggtccggctgactctctcctgattgtgttcgataagcaaaagagaggaaatgattacaagccgcttccggtttccggtgaggatttgaaagatctttcgtctgattgggatgtggagttccgtcatagccgtgagaatacggtgcagaatactcatttcgacaaactgaaggatttaaaggatacggactatgtgaatttctgcggaacgattgtttatagaaagaaagtcaacgtctcttcgcctgtcgggatggtgctcaacctcggattggtacatggcgtgtcggaagtattcgtgaacgggcagagttgtggtgtcaaatggtatggccgccgtatccatccggtctcagcccggttgaaacagggggagaattcggtagaggtacatgtagtaactgttatgggaaactatatgaagacgctgaaggataataagatcgctcaggcgtggacccggaggcaggatgttgtgcagccggcgggattggtaggaccggtaaccgcttatagaattaaaaattaagaattaagaattaaaaaattaagaagctgaaattaagaaattgaagaattatgaatgtgattagaaaaataatgatcctgtgcttgttggcaggaatgctgatgccggtgtgggcaaaagattaccagatgactatgttcgggatcaagtcggatgggacgaccatgaatacccgttccatacaaaaggcgatcgactttatttccgagagcgggggggggcgtctggtgtttactgtcggacgttatctgactggcagtattcatctgaagtcaaatgtgacgatccatttgggagagggggccgtgttggtcggttccactaatccttatgattatgatatggagctgaatgcttggtatggtttgatcttggcgaataagcaggataatatcggtatcaccggcaaaggggtgatcgacggtcgtggacgtgagcttgccaataacttcatcaaccaggtttattcaggggtgatcaaggacaaactgcagttgggacgtgtggccaaccgtccgaagctggtttatttccgcgaatgcaagaatgtggagataaaaggtgtgacgatgatgaatccggctttctggacacagacctacgatcagtgcgagaacctgttgatcgatggtatcacggtgcatagccgtgcttactggaataacgacgggatggatattgtcgactgtaacggcgcattgatccaaaactgttatgtggatgcgacagacgatgcgatctgcctgaaatcccatagtgccgatgctgtttgccagaatatcgaggtgcgtaataatacggcttgttcaagtgcaagcggtatcaagttcggtacggcttcgactggtggcttcaagaacataaagattatcaacaatactatattcgacacgttccgttcggctataacgatccaggcggttgatggcggactggttgagaatatagtggtggacagccttcgttccatcaataccggaaatcctatctatttggtcgtgggagaacgtcgtgagggacgtcgcagccggatggacaacgtgcatatctcgaatgtttatgccgaagtcccggcaacgaaaccggatgcaggatatgactacgaagggccgacggaagataatccgcgtaatgtctcgccttccggcattgtcggcttgcaagataacaagattacgaatgtctctatcgagaatgtcgagatcgtctatccgggcggtggtaacccgttgtatgctaaagttgggctggacgaactggataaagttccggaaatgccgaaagcttatcctgaattctctcagcataaggagttgcctgcctggggattttatgtccgccatgccgatggggtcactttcaagaatgtgaagctgactgctttgaagaaagactatcgtccggctatcgtcttggacgatgtgcacaacggggcatttacaaagatcaaagtggttgaaccgtctgccggaaagaaggaaaagatacacgcttacaagtctacgaagataaaaaaatagaacgggagatacgggaaacacataaaaggggagggaatgcaaaatgtgcatatcccccccgcttttttatgtagcggaacagacaatactcccccttccttcttcggagcaggataagaaggaaaaaactgtttaagaaagactgaaccaatcaaatgatggtttatctggcaattactgaatacgactaggaaagactgggcttatttaagtgacgatagctatgtttctgtcgtcagacagcctggtcataaaccttttgcctttggtcgaatacgttttcgcccttagtcgaaaagatttttgacaagtgtcgaaagggcttttgaccaagggcgaaaagtaaaggtctggtagtaatggccgtaaatacctgtatgtttttgttttcttttcgtgataaagacggctttagaaatacccgtgcgtttccacatctccatatttgagggctatctctacccgtttgacagtgaatgtatcgttatcttcggactggaacccgatgcggttgtatccctgtttgagaacttcgtcgggtaggataaaggcatattccttttcttctttttccagccctcgttccctatcgtataggtgggtgtaggccggcatttctttctcaacggcttttccgtttactgtcaaccggcaggatgccggccgactggtgcggatgaataggattgcttcttccggatatccttcctctaccgaatcgccgatataaagattgacttctttctcttctcccttgcctatttttagcgggagtggagagtccggctttatattatactggacaaccccgtcagacagtgcatatatcttattcctgtcttttaaagtttccaacgatcctaattcctgaagcagttccggcatcatgacccggcaaacctggccgccgtcttccagatacagtttcccgtcatgttcggtattgagcgtgccgaaataataattgaacaggtagatcccgtctgccccctgtgagaggatatgggaacacatccccctgtgcatgccgtgtgaccagaattcccgcgggcggtagcctccgtcgtcgatcgaactgtagaacggaatgttgagctctttccccatttcttccctgaacttggctaccggcatggcgggatcgcctctccaatggacacctgtactgataaagtccagcaatccgaggcgtagccattcgcgtatatccagtcctttcatcatgttttgctcgaccgtcggtgccacacgtgcggagagtaggatctttctgccttgtttggctgaaatttcatctactttctgacggatgtctttcaccaactgtgtcatcagcggtgcgttctgcggccctgtgccagacttgaagtaaacgataaagcgcatgaagtcgagatcgtatccgtcgattatgtcggcgtaattttccaattgctcggaaataatcgccaatttgcggtcgcgcacttcctttatggcaaagtcaaaagccccgccgctgttataaccttgtgtcgtgtcgttcagccagtattccggatgctgaatccagaaatcggtgtaccagatcggacaatgggtagtcgtatcattgaaatgcaagtcgttcatccggtaagtgatgaaggcttccatccccttctcctttgccctttttaaggtataagcgaccaagtccgtcccctctttttccaggttcagatggttccggtagtattttcggaaagagttgtattgagctgtgtcgcaaccgcaatccaacgttccgttcagatcgtctcccatcacatggccgtatttggaacgaacatagaagaaatcgctgccggaacacatcatataggtcgtgacctgtgagttcgccaccatatcgacgcaggagtccaagtcggcaagcgtaagcggacgatacttgaaccagcggtttcctaacaggtcggaaccgtcgttgttatgaatgatccggaatgtccgttcgggagtcttttttacatcgggtgcacaggcaaagaaagcctgtgcacataaaagaatcgagagatagttaattataagtgatttcatggtgtgttgtgtgtttattcgactaatgagtacggcttttcctctgctgtgaactgccttctcttattggggcttgaagtcatttggaagacgagttcccctccgttcatgatgtcctgatgggtgatgtatgcctttttgtaaggttgaccgtttagggtgacagatttgatgtagcggttcttgtcactgaccttgtccgctctgactgtaaatgtttttccgttttccaggtttacctgcatatagggcaggtaaggagctccgatcacatactgatcggttcctgggcataccggataaaagcccatggctgagaagatgtaccaggcggacatctggccgcagtcgtcgttgccgcataaaccgtcgatattgttgcggtacatacggttcatgatttcacgaatccagtattgcgttttccacggttcggtagtccagctatataaataagggatatggtggctcggttcgttaccgtggacataagtgccgagcaggccttctcgtgtcacatcttcggtctgggcgaagaattcatccggcagatgcatggtaaacaaggagtccagcttgttgataaaactgcggtttccacccatcaggcgaatcagatcggacggagcctgcggaacatagaaagagtagttccaggcatttccctcgataaaaccttgtccgtgtgtgctgagcagatcgatctcctctttccagctaccgtctttgtaacgcggacaggcaaaaccgagaccgggtttgaacacgttccggtagtagagggcacgtttcttgtaagtatcggcaatctgtttgtctcccagcaaaagggcggtgtgatagaccgtccagtcttcataggcattctccaacgtgatggaggcggaagtgggggattggtcgaaagggacatatcctaattgtttatactcatccgtatgatcataataaggcacgtttgaactgctgaccatcgctttgactgcttcctgcttgtcgattggcaagcctttggtgatggcatcggccaggacggaaaccgagtgatagccgatcatgcaccagttttcgttacccatatgcgaccagaccggcagcagatgatgcacgctttggctgtaatgggcgagcatcgactttacaagattcgtactgacatcccgtttgatgatgttgaacagcggatgtaaagcccggtacgtatcccagactgaaaatacggtatagtttgtaaagccctcggcctggtggatgttgtggtcgatccctcggtatttcccgtctacatccatataaacggacgggttgatcatcgtatggtacaaagatgtgtaaagcatggatagctggtcgttactgccctctgcatcgatgacggatagtgcgttctcccatttcccattcgtttcctggcggatcgtgtcaaacgatttaccggtagcctctgcttgcaggttctttacggctccgtctgttccgacagccgaaagagccactttgatttcgagcggagcgcttccttctttgaactcgaaataggaaacaactttacgtcctccgatctccgggaagttctctgctgtattgaaacgccggaaaccacccggatagttgactttttcccggtctgtatatccgtaacgggtgaccggctgggagaacgagatggcaaaataggtatagtttacgcgactccatccgttggtaatgcggtagcccgtaaccaaagtgtcgttttcgacccggaggtttgcccataacaccttgccatcgtaattgtagataccgtggttgaggtcgagtatcagctgtttcttctgatcggccggataggtgtatttatgaataccggtccgttcggttgctgtcagttgcactttgatctgatcgtcggtcagcaacacttcgtagtagcctggacgggatatttcggtgtcgtggctgaatcgggaacgatagccgctgtccggattatcagccgtaccagggttgatctgcaattttccggtgaagggcatcagcagaatatcaccgaggtcggaatgccccgttccgctgaaatgggtatggctgaagccgacgatggaactgtctttatgttggtagccggcacagtattcatacgcgcgaggctgatagacaccgtcgatgttatgaggaatggtatcggtatcaggacttacttgtacgataccaaacggagcgcaggcgccgggaaatgtatgtcccatcccgtttgttccgatgatcgggtttaccagatcggtcttttgtgccataatcggcatgctcatgtaggcaaaggcgacgatcagtgatttcattagtttttgcatatgtgtgtttttcttattttctaggatgtccaaaagtaagcaaagtcgcaaatatgcaaatgtattttttgtcggatttatttagatatttggctaaatggtgaaaagcggacgttggtcctaaccggcttgtttcccttgcggacgcgatttacctgttatggccatcagactggcgattggaaaatagatcagtttcctcatggcaatcactgttttaattcttacgaaaatgcgtttcctggtaagaacaaaaaggccgcctttttttacagaggcggcctttcggatatatggaataagtttgttattacttaaccaatgcagcgaattcgctgttagttgcatattttgcaaattccaggtcgatagcagcttctttagccatagccttatcagcagcgatagcagctttcaggttgctgataactgcgttagcgtcgtttgtacgagcagctacgatagctttcaggtaagaagttgtagcgtcgggtttagcaactgcgttcagagtttgagaagctttgctgtaatccttagtcaggatctgagccaaagcagcgttgttagacttaactgaaccgaaagagttggcagccttagcccattcgccctgttccagatacagaacacccagagcttcgcctaattcagcaacgcctgctgcgctaccgaacaactgttgagccttagcctggtcacccttagtcagagcgatcaaacctaagttcatgttagcttccggattagcttttacagagtttgatttgttgaacatctgttctgccttagccaagtcgccggcacggaatgccatcataccgatgttgttccaagtgcggtagcagttaggatacagttcagaagcttttgtatagatagccatcttttctgcgtcgttgttagtcagagtagcagcatacagaatttcttcgatgttcagttcagaaggattgctcttggctaatgcgctgatttcgtcgtcagacttgccgatgatttcgatgttggcagtcaaacgagaacgacgaagttgcggcaagattgtttctgccagatcagagtaaacagcagagatattcttgatttctttttctcttgtttcgggatcctggtacatagagataactctcagtacgaggtctttatcttgcaagttagatgcagctaccaattctttgaagccttcccagtcctgagcagtgtaacgagcgtcaactggagcgtcaaccttcatcttcttcaattctttagacaggtatttgcttgtgttgccttcacgtctttcagccaagccagtgttcagtttaacaccaccatcaggagaagcgtaagcagagatttcgattgctacgttctggttaggagcttcgtctgcattcttaacaagttctttccattctttgattgcgtcagagttcaactcttgagcacgcaggttagcctgttggataaggaacatgatgtttgcgtcgtgagcttctttgatgatacgttggaatttgtctgctgcaatagctgcattagcagtagctgcgtcagccagttcggatgtagcgatcacaccttctccgatttttacatccggcaatttaactgtcttgttcttgatctttgcgtcgaaagtcagatacaattcagatttcttcatttccggtttgtaagtgaaagcagatttcatggttacgttagcaccttctttctgtgggataacttggttgttgccctttactttttcaccttggtaagtgtaagatgttccccatgcttcaccaccggcataacgaagaaccggagtcacagttacaactgcttttttgttgaaccattttgcagggaatgtggcattaatagtcacaggaactttgcctccgatggcctcaagcggctgcggttcagctttgatgtactcttcagctaacggtttcaacttgtttgaacaagaagaaaaagtcagaattgctgccaatacgaggaaaggcattaaatactttttgttcataatttgatgtaagtttaaaatgttactatgtttatatattcactttcaaatatcccttagccatcaaagtgcaaaactaaagcatttttttgttatgaagagcaaacaagagataaaatctttccaattaatacttattaatgaatcttgtctccatttttttcagtctgatgtcaaaacagataggaaatgaatccggtgaatcctttcggattttgtctaacccttattgtcaaattttaatcaaaacagggctttttgagtataaagtttgttattgtaaacaattttcacaatatatatgccggccgggatcgaaccaatcggcaaggtcgtttgttgcccggtgatggaataattgcgtatagcctttcctgtgggcgaaacaaaggtgagggaggcccggctgacgggaactgcaaagtcgatgtggatcgtatgccggtatctgtcgacagacaggctgacatccgttgccgcttctatgtgctcgttggccgttccgcttccttcgttcggatccattccgttgcaactgcgagctgttactccgataggatcgagccagtatttgagctgcttgctactatcggccggttcggaccagcttttttgtatggagaaaaagaagtcttcgaccggattgagacagctggaagcaccgcctgtcaagcctccgatgatccggttgtcgctatcaaaaaggggagaaccggacgagcctccggctgtacatcctgtcgcccaacgggctaccttccagtgtgaattttcattgaagtcggtaacctgtattttataggtcgtcagctctacgtttccttcggcgaggttaagcctcttgagcgatccgcccggatggtggatacacgtataaggagctgtccccgcattcagcgcgttccagccggcataataggctcggtaatcggccggtggtgtgtcctgcaattccagtaatgccatatccgttgattcattcacagcccggaaatgggccgaagcgattgtctggtcagtacgtccaggttcaaccggactgcattgggggctgttgtaattgaagtaacagacaatattgcctgccacctcttcataatctgggtttttgatctggaactggttattcaagcaatgcgaggctgtaaggaggtaaggttttccgtcgttagccgtgttgttgacaagcgttcccgtgcaaccggtcgtcccgttgataatcatcaggactacactgcgttcgatagcgtcgtaacgggttgtcgaatcctggtagcaggcgatgaccggcatacatctgaaagccgcaaagtcgggctgcggttccgagagtctgaggtttcgatagccgtggttcacctcgccgaccgcgagttttccagggaaagcggttttcgccggttcttggtattcgatgatcaactcgtctccctggatcggggccacgggcagaatgccacgttccgaattgttcaggtggttgaacgagcccaagacttccgattggtcgctattgtacaggaatacgcgtgcgccttcgggcagatggtatttactgaacattatattgagggagagcgcaccttcggaacgtatcccgagtcgccagacctttgtcccgtcggacagggtgaaatggactccggaattctccggcgtatagtctgtcacgaacttataggcaaagcggaatccattccgtaggccggttgcttctagcgaatcgagccggagctgttccgccaggtcgaatgggggcattgtaataaacatatcctctgtcaggcttttggtggccgtgagagggagtggctgtcctccgtgactgatctgtgccttgacggaaacaccgagaaacaggcataatccgaaatatattataataataagatgctttgccataatagcgacaaatatacgattttaggaaaataatcagctatttcagattcattttaaaattgctcctgatatttgtcctgtcaaaagattagacagataaaaagtagaactataaaagatgaatgaaatgaagaaaattttagcactgttagtttgcctgcttaccataagtacgggcgttcgcgcggacgatgaccgtccggttcgtttcgaccagctgcccgctaaggcacaggcatatgtaaagaaatatttcccacaggaaaaggtggcgctggcaaagatggaaaaggattttttcgacaagaagtatgaagtgatttttgccaacagcagcaaagtggagttctttaaggacggaacttggaaagaagtggattgcaagtattccactgttcccgaagctgtcattcccgaagccatcctacgctatgtaaaggctacttatcccgatcataaggtcgttaagatcgaaaaggaagaccgggggtatgaggcgaaacttgccaacggtatgaagctggagtttgacaataagtttaacttgatagatatagacaattaattaagaaccgattttaaatagaaatggtatgattaaaaatgtatttttacttgcggcactatctctgtgcctgttccaaagttgtgacaatgatgataacgaaccggttcccggttatgtgagtgccgaaaccaaagctgcttttgacgaaaaatatcctgcggcaaaagatgtggagtgggagacgcgtaacgattatttgattgtggatttcaaacaagataaagtagagaaggaagcttggttcgacaatagcggaacttggtatatgacggaaacggatatcccttttgcacagcttcccgatgcggtgaagactgctttccagcaaggtgaatattcgacttggaaagtggacgatgtggatatgatcgaacgccgggatgtcgagaccgtctatgtgatcgagacggaacagggcaatagtgaggtggatctttattattctccggacggtatcttggtgaaaaccgttctcgatgcgggtgggaacgatggatatgaagatttcatcccgtcacagccttcctcttccgtagatgcttatgtcaaagaacattatccttctgcccgtatcttggatatcgaccgggaaaaaggtgttacggaagttgaaatattggatggaacagtttgccgcgaactcctgttcgacgatggaggcgcttggatgcagactaaaacggaacttcgtattacagcgctgccggacgcggtaatggctgctatcaaggcttcgcaatatgcaacctataggatcgacgatgctgatttcatcgagactctgactggcgaatggtatctcgttgaactagaatccggcaagcaggaagtgaaacttcgcatagacgctaccggaaagatattgtagaaacctaccgttatcgctttcaggttcgtgagagaaaattggacatggtatccggtatatcggagataatccggctttgttttccagccaccaaacaggtgatagcccgttcccatgtccaaaacttagtatttgcagtcgtgtaggagatgtgcagtagcatccaaggtaattagtgcttcggagaaacggacgcatgttgcttaatccaattccagcctgatgaccgttccgtatgaagggacatttttgaatgcttctttcaagtcatattctccggcatagacacgggcacaggtcaagactccgccatgtgcgaaaatgcatactttctgcaggtcactttctcttatttcatttaggaaatgactgacacgggtatattgatcttgcaaggattcgcccgaaggagccggaacattgatccagtcgttgaaccaggcttccgatcgaggatcggaggatagttcgtcccaagatttcatttcccattccccgaagctgatttccttaatgcggtcttccttttctgcgtccgggtagccgcaataggcggcgaggcgggtacagcgtgtaagcgggctgctccacactttgtcgaatgtatggccggataagtttttttttacggcttcggcttcatcttcgaatgaaggacgaaggggaacatcggtttgtccgtatgcatagccggcgggaatgtcgacggatgtatgtctgaccagataaatttccatgtaatatatgttttatatgattgtcgtataaataacggctatccctaaatagaaactcagttcgcaaagcaaaaatgttgctccgcagcagtcacctgtatagccttgtattttctttttcattagagaggtgagaaaataaaagacaagaacaggcagtagacctgccaggagataaacgggttccggcagccagaacatcggaatcagagcggagaaaaggcaacatgtatattcacttgtagtcatccggctgtagaccgttttgtttttggcctcttcttccttgcgtgcgtagggaagcctattgatgatcattccggcaactcctttggaaaaaggatcgcctgccagtatcgcacttccggcaagagtcagtggcaggctgctcaacaatgtatatagaagtgcaaaataaagaatcaacccgatcaccccgtagcttcctatatgtgagtctttcataattgaaaggatacgttcgcgcgaagtccctcccccgaagccgtcgaaaaagtcggcaagtccgtcttcatgtaggcaaccggttatcagcagccgggtgacgattgccaatagtacggcaacacttgccggcagtatcagtgaagctgtgtaaagtacgattacggaaagcccggctgtgagccagccgactaacgcccagcggctgactacattcttgaaatattccgaaggaacttcagccagtcgccagaatggtagccgggtgaaaaatataaaggcggcaaggatacggagcatggattggaaattaataattaaaaaggagttagaaatatttggtgatggaggcttgctggaagctgtgcatctcgttgatcatgcggactgccgagtccacaatcggataggcgcatacggagccggaaccttcacccaggcgtaagccgagatttagcaacggcttggcttgtaggatatccagtacacgtttgtgtccggcctcgtctccgcagtgtccgaatatgcagtagggaagcatttccggatacaagtgtgaagcagccagtacgcagtttgtcatgataaagccatctaccagaataaccatcttcaattctgccgcgcggagcatgcctcccacagccatcaccatctcgtagccgccgaaatagcggattacatccaacgtgctgttgtctcccttgtagttctcgagtgcctttcttaagacattatatttatgtttgaccccttcgttattcaagccgcttccggcgcctacgcaatcgatcagcgggattcccgtcaagcaagtcatccacatacttgatgcagcggtgtttccgattcccatctcaccaaaactgatcacgttgctccctttgtcgtagcaatctgtgacaatgtcggctccatattggattgccaattccatttcgtcttgtgtcatggccgcttcatacaggaagttacgggtccctttcctgattttccggttgatcaactctgggatggcagggaaatcgaaatccacacctccgtcgacgatcttgatttcgaagccatgctggcgtgaaaggaaacagatgcctgctcccccgttcaggaagttatgtatcacctggcgtgttacttctttgggggatttgctgacgccttcatcggcgattccgtggtcggatgcgtatataacgttgaccggatgatggagcaccggggataatgtttgctggatcagaccgatttggagtgcaatttcttcaagtgtacccagtgaccctttgggtttcgtcagattatcgattttgtcctgcagggctgtggtgatagcggtgtcaggtttttgaatgttgaaagagatcatggtatagtgtttttattattttaccttcatgggaataccgctcaccatgaagacaacttcgtcggcacgggatgcgatgtattggtttaaccacccttgcaggtccgtgaaccggcgttggaccgcatcgggagaaacgccgcctaatccgatttcgtttgtgacgaagatcaggtaggcatcctgctctgtaaatttattaaattcttcttttaactcggccaaggaacggttcgtgtcaccttcattgtcgaagaaaaagttcgttccccaaagagtaacacaatcgataacgaccacatggccgttcagatcgtggcggctcaggtatttttcttcttcgatattcgtccattccggtccccggtcggcctgatggcgaagtacacgctcgcggaactcctcgtcccagacacgtgatgtcgccaggtaaaccggattagctgtcagtgacaaagcaagtttttgcgcatatccgctttttccggaacgttggccgcctgtcactaaaacgatatgcttttttcccattgtcttattctcctttcggtttattgcgggcggcagcgcgttttgccttgttgagcgggttgttcttgcttgtcttgcgcaacgctgccgattttggagaagaagccaagcgttgtgcaacggccgaccgtcctaatgatttgccgaatttggggcgcaaagcttctttcagcatctctttgtcgatgccagtcacctttgtttcttttttcgtgctttctccattgcgtgcagcatggcgggcggctgcgtatttattgtattttacatatttgccggggcgtaggccttttgaaccggctgctggagaagttgccttcttttcggaagtcgccgtagacgagggctttgtcttcttcgcctttttttcttgtccggcaagttccaactcttggatattgatccgtgcggaagatgtttgtttgcccgtatgctttccgattctaacttgtatatcatccagcatgacgatatcggcttcggttactttctgcccgatatgaggcaggctgccgtttacggtgacacgtccttcttcgatgaatttgtccgcttccctgcgtgaacaaaggccggaatcactgatgagcttatttaatcttacttccattttgtacgtctttatttagtggataattattgatattaaacaaacaataagccccatgagaagttcggcattactgtttgttttgatggcaatcaacatgtcttctgttgtgaaagtccgttcgttgatcccgatataaggcttttctaccggcttcccgaaataatcgtgggttcctccgaaacggcaattcaatatagcggcaagggcagattccggatagcctgagttcgggctggcatgagccggaccgaagcgcttaacgaaatccgttttgttcaagttgccggaaacagccagcatcaaccatgctgtcaaccgggcagggatataattggcaagatcgtcgagccttgcggcaatctgcccgaattctaagtaacgttcgtttttgtagccgatcatcgaatcgagcgtattcaccattttgtaagccatcatgccgggaagtccgagcagggcaaaccaaaacatgggagctatcactccgtcgctcaggttttccgcgagcgtttcgagagcggcggcccgtatctcttgtggggagagacgggaagtgtcgcggcctacgatccgcccgacttgtttgcgtccttcttccgtgctgcggtctactgcttcgaaaacggctttcacttctttgaccagcgtttttcccgccaggcagtaaaagacgcctatcccggatagaatagatgctactatcgggtgaaagtatccggcaagcgccagtatccgttcgcagagcaaatacgttccggcaaccagtatgagtgccatgacgcctcctttgacagtccggtcgtttcctttgttcagcgtcttctctcctaaagaaatcactttgccgaaaccaacaaccggatgtggccatccttcaggatcacccaacaagcggtctgccagccatccgccgatgaacgggaaggcttttgccatataaaacgattgatggaaccaataatacataatagtggcaaaggtaaaaatataatttcagttatggaatccatcgcctatattccttatgatttatcgaggtaaaattgaaggaggaagatatgctcttcaccctgataccggtaggagatgtgcaacccgtattgacgacaaatcgcttcggctatggcgaggccgagtccggtcgattcctttttcttgctcccctggtagaaacgttcgaagatatgctcgctgtcgagaggtacggtttgccctgtgttggcgatagtcagcgagtctgcctggatcgtgacacggacgtgtcctttttccttgttatggataaaagcgtttttcagcaggttggagatgagtgactccgccagtgtctcgttcatcgttatcttcagtaggccctgttcctccagtgagatctgggctttgtagtggctgaatatctctttgtaatcatctaacagccgtttgacgatgctgttgatttcgaccggacggctgtcggtgaattgtccgttgtcgatccgggagagaaacagcagggatttattcagccggacgatgtagttcagtgtatgcttggtcttgaacagttcttccatttgttcctccgtcagttccgtattgtcgagcagccattcgatacggttgttgcaaacggcaagtggtgtttgaagttcgtgcgatgcattgccgataaattgcttctgctgtttgaatagttgttccgagcgttcgacggcttgggctgctgcttcgttcaacctgcggaattccggaatacgggtgtcgttgggaacaggtccgtgctgtttgcccggcaaataactgtccagccagttcagtagcgcgtacaacgggcgcaggctccgatagaacacccaaatgcagaccgtaagcagggtgaccagtaaaacaatataaagaaagagaatccagttggcgacggcctcacgtaaatcttctttttcaaaagagggagtcgagacttccagtaggaaataattgtcatctttatcggcgaagatggtccgcagcacacgtgccggttcagtctcttccttttcctttatatatatgtcggcatcgtagtattcgatcgctgggtattgtctggcttcttcccttgttatgggacggatggaatagctgttgttactcccgtcgtttttcgaaggaagctctttgccggcaagtgagcggatgatgattgtttcggagtagtcttccaatgcgtcatctacttcgtcgttgatctcgtcgatcatggtgaagtaaaagaaaaccgtccataccgtcaggacggccagcaatgccagggacaggcggatcaatatgcggtaaattagtttcatgtctgtcgtgccttactcctcttcgttgatgactagtttatatccgaagccgtagatggagcggatttcaattgttgcacccgccttctttagttgttgccgcaaatttttgacctgtgcatagacgaaatggaaactgtccgcctggtcgatatggtcgccccagacggcttcggccagtacggccttgtcgatgatatggttcgggcggttggcaaaatagaacagaatgtcatattctttcttgagaagttccagctccttgtcgccaacgaatacccggaaactatccggttcgatccgtaggtttcccaatcggagggagcgcgaaccgtcgccgcgctgtcgtctcagtacgcttttgatccgggcgtttaactcggccaggtggaagggtttcggaaggtagtcgtccgctccctgttccagccccaagaccttgtcctcgatggagtcgcgggctgagatgatgatgacgctttcccgcttctgctgctccttgagcatttccaacagcttcaggccgttcccgtccggcaacatgatgtcgagcaggatgcagtcgtagctgtagtccgctatttttaggctcgcttcgtggaaggtactcgctgtttccactacatatcgctcttttaccagtgttttttgcatcagttccctgagcgaaggttcgtcttcaactattaatatcttcataaatatcaccttatctgtttccaaagatacgaagtgaatttaaaataaacttgaaatgatcattttaaaaaggcaaacaactgtcgaatctcatgatttttaattaagtttgccagtccgttcaaggatacgattttaaaaccaatattataaattaaaatacaaacgctatggcaacaactcctttcaagtatcaggctccgtttccattgggtccggatacaacagagtattatctgcttacaaaagattatgtttcggtttctgagttcgaaggaaccccggttctgaaagtagcgaaagaaggtcttacggcaatggctaatgctgctttccgtgatgtctcctttatgcttcgccgctcgcataacgaacaggtagctaagatcctgagcgatccggaagcaagtgataacgataaatatgtagcgttgactttcctgcgtaacgcagaagttgctgctaagggtgtacttcctttctgccaggataccggtacggctatcatccacggtgaaaagggacagcaggtgtggaccggctactgcgacgaagaggcgctttcgttgggtgtctataaaacctatacggaagaaaacctgcgctattcgcagaatgctcccttgaatatgtacgacgaagtgaacaccaaatgtaatctgccggctcagatcgacatcgaagctacggaaggtatggaatataagttcctgtgcgtgacaaagggtggcggttctgctaacaagacttatctgtaccaggaaacgaaggcaatcctgaacccgggcactttggttccgttcatcattgaaaagatcaagacattaggtacggccgcttgtcctccttatcatattgcagtggttatcggcggtacttcggccgaaaagaacttgctgacggtgaagttggcttctacacattattatgatgaattgccaacgaccggtaacgagtatggccgcgctttccgggatatagaactggaaaaagaagtgctggctgaagtacacaatatcggtttgggtgcacagttcggaggaaagtatctggcacatgatatccgtatcatccgcctgccgcgccacggtgcttcctgtccggtcggtttgggtgtcagttgttcggctgaccgtaacgtgaagtgtaagatcaataaagacggtatctggattgagaagttggacagccatccgggcgaactgattccggctgaactgcgcgaggcaggtgaaggcgatgctgtcaagatcaacctgaaccagccgatggccgaaatcttgaaagaattggataaatatccggtagctacccgtctgtctctgaacggtacgatcatcgtaggccgtgatatcgctcacgccaagctgaaagaacgcttggaccgcggtgaagacctgcctcagtatatcaaggatcatcctatctattatgctggtccggccaagactccgactggtatggcttgcggttccatgggcccgacgactgccggtcgtatggactcgtatgtcggtttgttccagagccacggtggcagcatggttatgttggcgaaaggtaaccgtagccagcaggtgacggatgcttgccagaaatatggcggtttctatttaggcagtatcggtggtccggctgctattttggctcagaacaacatcaagagcatcgaatgtgtggaatatcctgaattgggcatggaagcaatctggaagatcgaagtagaagacttccctgcattcattctggtagacaacaagggtaacgatttcttcaaacagatcaaaccgcgttgcacttgtggtaaataagacgtgctttacgttcatataaaagggagggaatgattttttcattccctcttttttattgagatgtttacagcttccgtagctggtaatacagaaatggacaggtgggtcaaacttgtccggttggcgtttgtccggaagcgatgcttgttctttccaaaaggatataggcttgcttggaataggctataccctttttgtttgtagcctatatcctttttccggataggttataggctattttgattaaatgttgcggatggttattgctttttcattcaccttgtttttctgactgtatggatggggggcaatgaaaagcgaggtgaagctgaaatcccagggtgaaggtggaaaaagatagtgccttcaccctgggaatgtttgaaatatatggcatagagataagaggtgaaggataaaaggaaagttgcgtataaaaaataactcccgtccctcaaaatatggggcgggagttgtttagaaattatacacgtatgtgttttaccgattcttaatcctggcgttcgcggcgaggaccacggtctccacgatcctgacggggaccacgatctccacgttccggtctcggaccacgttcggatctcggcggacgttcttcgtaaccttccggtttcggtagcagtactttgtgagataatttgaatttgcctgtcttggcgtcgatgtctaccaacttgacgctgatagtatcaccttctttcagaccggcctgttcaactgtttccaaacgtttccagtcgatttcagaaatatggagcaagccgtctttgcctggcatgaattcaacgaatgcaccgtaaggcatgatagaagaaatctttccttcgtagatttcgccgatttcaggaacggcaacgatacctttgatagcgcggatagcggcatcgattgtcgctttattcgttccggagatttcgattttacccactccgtcttcttcttcaatagcaataacagcacctgtcttttcctgaataccctggataatcttaccacccgggccaattactgcaccgataaattctttgccgattgtcattgtttcgattctcggagcgtgaggcttcagatcagaacgaacttcaggctgggcttccatgatcttgcccaagatgtgcatgcggccttcttttgcctgtgccaatgcgttttcaagaatttcgtatgacagaccgtctaccttgatatccatctgagtggcagtgataccgtcttttgtacctgtcaccttgaagtccatgtcgcctaagtggtcttcatctcccaggatatcggataggatagcgtagttctgacctttgttctcggagatcagacccattgcgataccggacacaggcttcttcatcggaacacctgcgtctctcaacgccagcgtacctgcacatacggttgccattgaagaagaaccgttggactctaatatgtcagagatcacacgtactacgtaaggatagtctgttgggatcatccgtttcaatgcacggtgagccaggtttccgtgaccgatttcacgacgacccacaccgcgggaagcttttgcttcgccagtagagaatggtgggaagttataatgtaacaggaaacgttcttttccgtgattcagtacatcgtcgatcattttttcatcggcttttgtacctaaggtgacagtcgaaagtgactgtgtttcaccacgtgtgaaaatagcagaaccgtgagggccgggcagacagtctgtttcgatccagatcggacggatttcagtagtcttacggccatccaggcgttttccttcgtccagaatagcacggcgcatcgcttctttttctacatcgtggtaataacggccgatcatttcaaccttctcgtctgtcaattcttcttcagagaattgagctttatattcttcgacaactgcttcgaatgcttcggcacgctgatgtttgtcggtaccggaggttgcaacagcgtatgcttttgcataacatttttcgtgtacatctttgcgcagttcgtcgtcgttgatttcgtggcagtattcgcgtttaaccagtttgccgcaagcttcggacagttcaagctgtgcctggcactgtattttgattgcttcgtgtgctactttgatcgcttccagcatttctgattcttgaacttcgtccatttcgccttccaccatcatgatgttgtcaagcgtagcacccaccataatatcaatatctgctttttccaattcagagaacgtagggttgactacatacttaccatcgatacgtgcgacgcggcattcagagatcggtccgttgaaaggaatatccgatacagccaatgcggcggaagcagccaatccggccagtgcatccggcatgtcttcaccgtctgcggagaataatataacgtttacatatacttcggcatggtaattgtccgggaaaagaggacggagggcacggtcgaccaaacgagaagtcaggatttcgtagtcggaagctttaccttctctttttgtaaaaccaccaggaaaacggccaaatgccgagaatttttctttgtactctacttgtaacggcatgaagtcaacacccgggtttgcatctttagcggcgcaaacagtagccagcaacacggtgttgcccatacgtacggtaactgcaccgtccgcctgttttgccaatttcccggtttcgatggtgatggttcttccatcagccaattcgatcgtcttgttaattggattaagcataatctttttcttatttttctatctgtaaaattggtgcaaatgtaatgaaagtttatctgtaaacgtgtgaaaatgaaaataaaaaacatgagaaaagctcttttttataaaaatagcaggaagatttagcgaataatggtgccacaattgtaaattaatgtatatttgcagcggattaaaacaagaagtaaagatatgatgaaacaaatatccacacgactgttgactgttttaggactgtgcatgttctttttctcagcttgtaacaactcctcggatttcattgtgaagggagtcgtggcaggggctgacggtcagcttatgtatttagaaaatgtcggaatctctaatgtggtgacactcgattccatcaagctggctcctggcgggaagttcaagtttacggaaaagcgtcctgagtatccggacttttatcgtttgcgtctgaataaccagttgatcaattttgcggttgattcaaccgaaaccatatctttcgttgctgatgctggtactttcgcaacttcctattctgtagaaggatctgaaaactcaaaggcgataaaggcgatcaccttggctcaactggatgcaaaccaggctatcagccgcttgaggaaggaatatgaagataaaatgatttcagatacgacctaccgtatgaaggttttggctgctgccgatgcctataaagaagtcgcccggaaatatatttattcggcgccgatgtccacagccgcctatttcgctttgttccagcagatcgatggtttgttgttctttgatttgtatgacaggaaagatgtcaaggcatatggagcggttgcgaccagctacaatcatacttatccggaaagtccgcgttcgaagcatttgtacaatctgacattgcaatccatgaaggtcttgcgtgcgcaacgtcctgtcgattacagcaatgtggaaacaaaagaaatttcattccttgatatcgaattgccggatgttcggggtgaagtggtaaaactgtctacggttgctcccggcaaggtggtgttgataaactttacggcttatcagacggaatggtcgccggctttgaatatggcattgggtgaattgtacacaaaataccatgaccaagaacttgaaatttatcaggtgtcgttggatagtgatttccatttttggagaaacggggcctctaatttgccgtgggttactgtccacgatccgcagtctgtttattcgcaggtggcaggtttgtacaatgtaaaacaattgcccgctcttttcatcctcgatcgcaaaggaaacttggttaagcgtgtcgaagacgtgaagaaactggaagcagacgtaaaagcagtactttgatttgtgaattataatttatacgttgatgaaatcataactcataggtcctaacatgttgtaaagcacttcaaaaggatttgcgttcttaaaaaagatcgtttatctttgcaaagtctaaaaatacagagaaagaggagttccggccaagcagttggtcgggattctttttttattatgcaataatcaataataacattttaaataaataggaggatttagtatggcagtgagctatatgacgaaagatggctatgataagattttagctgaaatcaattatctggaaacagtgaaacgtccggaaatatctgcccagattgcagaggcccgtgacaaaggtgatttgtctgaaaatgctgagtatgacgcagcaaaggaagcacagggcataatggaagcaaagctttcccagttgaagggcttgatttcaaatgcccgcctgatagacgaaacccgtgttcaaacagatgaagtccagatcctgaacaaggttaagatcaagaacacaaagaacaatgcagtcatgacgtatactctggtctcagattcggaagcaaacctgaaagaaggcaagattgcggtcagtactccgattgcgcaggggctgatgggaaaaaaggtcggtgacattgtggaaatcaaagtcccatccggcatgatgagctttgaaattatggatatatcgatttaataatataacattatggcatcaatattcagtagaattgtggcaggtgagatcccttgtcataaagtggcggaaaacgaagaattctttgcttttctggacattaatccggttgctgtcggtcatacgttggtgattccgaaaaaagaaatcgattatattttcgacatagaagatcccatgcttggacgtatgatggcatttgccaaacgggtggctcgtgcacaagaagctgttataccttgcaaacgggtaggtttggcagttatgggactggaagttcctcatgcgcatattcatttaattccgatccagaaggagtctgatatgtattttggcggaaagaaaatggaggttactcaggacgtgctcgcagacaccgctgcacggataagaaatgcctttaaataaatgaggtaaagtcttttttggtaaaaaactttatgtatatttgtaaccgcttcttcctctgtatgacaatattgagaggaagaaagcggttttttataaagattcattagtggtttttactcataaatttgttaaccttagaagaaaggccccccttgtgaaaggacggccttctttttttaacacacaattattgttatacgcaattttatttggggtttttaatcaactttggttatggaaccgctcccgataatgctcttttcctttatgttcggatttcctttgtatcggatagtcccgctcccggctattttggtggatattgccttgtttgcggtgatttcgatatgggtgcttccggccgctttgcaagtaagttcttctgtctctagaccaaacgctttgatcttgctgctaccggcgcttttaatattcatcttttctgttttaccgcttagagagacagtgccgctacccgcgatttcgcaatctaaacgggtgatggcaatggaatcggcttttatagttcctcctcctgcaaatctaatttccagttttttgccgttgagacctttgcctaaatcacaattgcctccgcctgccattttgaactctttcagtgcagtcgagttggttatcacgataaagcgggtggggttgattccggtatgcctatttttggggcggacaaccaacactttgctatcggtattgatatccagaagatccatgatattttggtctgtctcgactttcagatagggaacgtcatccgattgcatatatttgaagtcgacgttttctccctcgatttgtatctcgtcgtaatcctttatcgggatttccttgcttacgacattgccgtcaccggaaaccttgtttatatggcaggagcataaaagccctgccatgagtatgagtaccagtatgaatgaatatgattttttcatgattctgttgtttttatagattatatattgaagaaattgtaccagggtaatgtgctccatccgtttattccggtctggtagaagtagatgacgcacagcactacggatactaaccataagatcagcaacgtccatttagccgtattgggcaatggcttggctttgaatagttgcatgcagattgcatataccagggcaaaaataggaatgccaatcagtagaatgaatccgatgcatcccatgatggccaatgaaataggtgctcccgctatcagattggccccgaacggcgacaattgatataggaagcctgtgcctccggcaataagggcaaaggtgacgacgaccaatataaaggcaacgagcaataatggcggtagcaggatgattccgatcagtatggccaggaatttgaggatgaaacctaccacaccgacaaacaagtccgctagtttttgcagaaagcttctcggtttgtcggaactcatataatcatttacattattgctgaccttctcgaagccatccgtaactgttttgcctatgttttcgagggtgacgctttgtccgcgcatcatcagcttgtcggctgcggtccgggccaacggcattaccagccatagtataaggtataagatgatgatcggtgcataaggaataaaaagcaggatgatcatagcaaggcgtacagccgtcacgtcccatcccatataagcggcgataccaccggctacacctcccaatacccggttgtccggatcgcgcatcagctttttcgggcctctgggaatctcttcttcctgaaaagcttgtgtcctggcttcttccttatattctttttcttcttcaccttcaaacaattcttccggcttgcccatacgcttgattacttcttcgacatgttcgattgtgatcacttcgtagcccagtcgaacccgctcattgaatagttcggagatacgcatttcaaaatcgttcataatctcttccgaaccttcttccttgcggaagtggatgcggaggtttgctagatatttatcgagtagttgatatgcatcttcgtcaatgtggaaaaccgttcctcccaaattaactgtcagtgtcttcttcattgttttctgattttaattgtttctgatgtggtttattgtatcattcagttcctgccaggatgtttccagctctccaagaaattcttctcccttcggggtgagctggtaatacttgcgaggcggtccttgagtagattctatccactggtagcttaacaattcgctgttctttagtcttgttaacagaggatatagggtaccttccactacaatcaatttagcttcctgtaacttctggataatgtcagaggtgtacgccggctcttttttgagaagcaatagaatacaatattccaatgttccctttctcatttgtgattttacgttctctgcattcatttttattttgttttacgctacaaatatatgcattgcctgtgtactatgcaatacatactactatgtttatcctaatttaacattaatattgcacaaatccggcacttttgtgtaaaaaaggggctaatctcgtgacaaatagaatagaaaaccgtacttttgcaacatcaattcaaaacaaagaattatgatttactaccattatgccgagttggttcatcgacaggcagaaaaatatggctcccgtaccgcattgaaatatcgtgataatgcaaccgggaaatggttaaaaatatcttggaaggaattttctgaaaaagttatgcttacggccaaggcaatggccgaattcgggatagaagtacaggataatatcggggtttattcacagaatatgccgcaatgcttttatacggattttggggcatatgcgaaccgtgtggtttctattccgatgtatgcaacgaattctccggggcagatcgagtatataatcaatgatgctcatatacatactttgtttgtcggcgagcagttgcagtacaataatgcattcaaggtgcagaaagaatctcaatacctgaagcgcctggtggtgtttgatccggctgtcaagttgaacccggaagacaagacttcgatttattttgacgattttttgcggctgggcgataatgcgcatgccgagacaacggtaaagatccgtacgaacgaagcggtgccggaagacttggctaccataatatatacttccgggacgacaggagaatccaaaggtgtcatgctccatcattccaattatttggaagccatgcgtatccatgacatccgcctcccgatggtgacggataaagacctttctatgtgtttcttgccactgactcatatttttgaaaaagcgtggtcttactattgcctgcataagggagtgacgattgcgatcaaccaggatcctaaaatgattcagaagacattaccggaggtacaccctacattgatgtgcaacgtccctcggttctgggagaaggtatatgccggcgtgcatgaaaagatcaactcgtcatcttccaccatgaagaaaatctttttggatgctatcgagaccgggcgcaagtataacctggaatataaaaataagagcattccggctcctttcgggttgaaattgaagttcgaaatgtataataagactgttttcaatttgctgaaacgggtgttggggatcgaacgtggtcgttttttcccggtggccggtgcgccgctctcggatacggtcaatgaatttttgcagtctgtcaatatccctattgtgtatggttacggtttgagcgagacgacagcgaccgtctgcttctatcctgaaatcggatttcagttcggttcgatcggagaagtcatgccagatgtacaggtacggattgatccggagaatagcgaaattctggtaaaaggcaagactgtgatgtccggttattataataagccagccgaaaatgaaaaggcgtttacagaagatggttattttcgtacaggagatgccggaaggatggaagggaacacgttgttctttactgaacgtatcaaggacttatataagacatcgaacggcaaatacatcgctccgcaagcgattgaaatggttatgagcggcgatcagtatatcgaacagattgctgttatcggtgaccagcgtaagtttgtcagcgcgttgattgttcccgcttatccattattggaaaagtatgccgaagaaaaggggctggctgtcggtagccggaaagaacttgtccgaaataaggaaatccttcgcctgatcgagacacatattgaggaaaaccagaagaacttggcttcttatgagaagatcaagcgcttcaccttgctgtccgaaccttttacgatgggggctgaactgacggatacacttaagctccgtcgttccgtcattctgaagaaatacgcagatccgatcgaaaagatgtacgaagaagcttcgaatatgtggggtagtaatccggtttagatggggtagctgtgacattttgatagtcaggaaaattgagtatctttgcgggacaaatttaaaaacaagaatttttatgatcacatcagaccaactacacaatgtgttggagcgcgagcaagcgctgagggggtatctttgacatagatggtaagaccatccagttagaagaagaagagttacgcactcatgatcctggtttctgggaagatgccaaacgggcggaagtccagatgaagaaagtaaaagaactgaaaaagtggatcgaactttataacgaggttcatgctgcagcagaagaattgcagttggcttatgattatgtaaaagaaggaatcgtcagcgaagaagaagttgacgaggcttatggcaatgccatccagttggtggaaagcctggagttccgcaatatgttgcgtcaggaagccgaccagatgagttgtgtgctgaagatcaactccggtgccggcggtacggaaagccaggactgggcttccatgttgctccgtatgtatacgcgttgggcggaggcgaatggatataagatttccgtagccaactatcaggaaggggatgaggccggtattaaaacggcgactctcaacatcgaaggcgactatgcttacggatatttgaagggtgaaaacggtgtgcatcgtctggtacgtgtgtctccttataatgcgcaaggcaagcgaatgacttcatttgcttctgtttttgtcaccccgctggtcgacgacacgatcgaggtgaaaatcgatcaggctgccatctcttgggacacgttccgttcgggaggtgccggtgggcagaacgtgaacaaggtggaatccggagtgcgtctgcgttatcaatttaaagatccttacacgggcgaagaagaagagatcctgatcgagaatacggaaacccgcgaccagcctaagaatcgggagaatgcgatgcgtcagttgcgttcaatcttgtacgataaggaattgcaacatcgtatggaagagcaggcaaaggtggaagccggaaagaaaaagatcgaatggggttcccagatccgtagctatgtgtttgatgatcgtcgtgtaaaagaccatcgtaccaatttccagacatccgatgtcaacggtgtgatggatggtaaaattgatgatttcatcaaggcttacctgatggagttcggtgctgaggaatctgcagaaaagtaagatttctactttaacatttgcatatctcgattataaatcgtaatattgcacccgatttcagagctacgctttgaacaggtcctatagctcagttggttagagcacctgactcataatcagggagtccttggttcaagcccaagtgggaccacacaaaaggtttacacattgagtgtaaaccttttgtgtttttaagtacttgccgatttccatcttatgccggtgcgaatgttgcccttttccgcatgatgggagatacttcccggaacgcgttgatcttccttgcccaaagtatgcaacccaaagagcaagttgcgcatgccatgaagacaatacccgtcgtgaccatcgtatcgtccaatccgactaaaggagataccagtcctccgaacccaaagccgactgcacccgataaagccgaagctgtgccggcatgttcacgttcacattccatagccaaggcggtagtcgaggtgaaagagaagcccatcatgaatagtaaggtgattagcaatccctcgtaaatccagaaattgcaatttaggttcatggctatacatacgataatggaaaggacaagcatgcctatgctactggcgagcgtgttgttttccggtcggcggaatctgacggataagccggcatcccaatagcaggataattcctaatgccagtaatacccagaagatccctttccagtcaatcccttctgttaagcctcctccgatgatcggagcggctacaggagcgactccgttgattgctccgattatcgcaagtgtctttgccaactctttaccggtgaacatatctgtcgcgacggaacgggagattacgataccgccggcacctacaatcccttgtagcaagcgcagtattgcaaatatctcgatagtgggagcaaagatgcaacctatcgtggaaatgataaaaagatacatggctgctaacaatggagagcgacgcccatacttatcacttagcgagccgaaaaagatttctcctgccgccagtccgatcatactggctgtcaaacctaattgtaccaatgaaggtgttgtcttgaaatattctcccatcgaaggcaggctggggagatacatgtctgtgacaaatggcccgaatgccgtcaacatccctaacagggtaaggagaaaaaacttggagtttccattcttactttgtatgtcaatcatcttttttcttttttatctgataaaacatgcaaaagtacattcaaacgagcaagtacgattgtttaaaatatccgtttctttggttattatcggtagcttttcaatatcggatttccgatcgccctcctcgatctgtttttcttggttcgccccttgttgaaaaatgccggtgaaggttactctgacgggcaagccgtttgtatcgagtgtcacctcttctcggtaatctatgtccattgacggttcacctccacggctgacttcgtaggttttgtccccgattttgttaaaatgtacccaggcatgtccgtcagccatatctttgggaggcgtgtagaatatgccggataattcccctttctcataactgaaatgagtcgcttgcccatccggatattggatcccggcaaactggttgccagagtaaatgaatgaagcggtaactagcccgtttgaaagaaggacactgggccgcccgtctatgcctgttagcttgatgtcgtcattatcgctgcaggaagattggcacaatccgcccatcaataagacggcggatagaatagtcgaaaataacttgttcataataatatctggtgtttgtttctaatatgatgaatggagaggaaaaagggttgcagcattttctttgcggatgtttataatttgctatttttgtaaaatgctataaccatccggtggctcggatataaaaaagtaaaaaatggaaaaagcgaatgttactttgtacacggtcatcggagattctaaccgtatcgtggaagcaatccgggaacgttttgaagagatgaccaaagaatttgtttgtgaagacgaaacgatcgacttgactttgccggatggaacacatgtcatcttctcgatcaagcaccggatgagcaagccggactttattgcttcccatatatctggtatggccaattatttctcgcaggtgaagacgccattggttggactaaaagaaaatgtcttgctccagatacgtgtgttcaactgtgtgactgggatcactttcgatctgaacgacaatgaagaccggacgaactatatcctgaaccgtttattcgagattgccggagacgtgaacggttttctgctctatccgagcatgcagatctttaccggtgaagggaaactcctcttctctgccaaaggcgaaagtcagttgaccgaatttatcccggtcgggaatgccgatttattggacgggaactaccaggaagaaactcaggctgatgtggaaagacgtttgcgttcgattgcgttgctcgaagagaaacatatcccttatatggaatatttgcgtagtgaagcattggaaagtgaagcccatttgagaagccgaaaggagatggtgcaacgtgccgccgcgttgtttgctgttgctgtctattcggaagtcatgctttcgggaggttcgggacgggaagaagccttgttctattttaataagatggaacagttgtacgaggtgaaatcttacctgtcaccggccgaagctgcttatatcgataatcctgatccggaagaacaggaatgtattctgttcggatggcgctatgaatgtgcaggtgttttgctttgggcggcaggtgttgtggatgatttgccttatccgtctgagattattgatgtccctgttttggctgctattttctggcaacataaaggtatcggtggattgctttcgaaaggtttctctcgttcgcagtccgaaatattggatgctgccgatattacacttcggtatgattgggcttgtgtggaagcacgagttcatggaaaagaagctcctgcttcgctgaatggggacgttgtcatggaacggcattatgcttttaattggattatcggagcgaatggcggtgcagactgggatgatatccaaccgaatacatgatgctagatctatcacgattttgaaaatgtcttggatgaagatatcagtctttgctcttgatggcaaatatccctttgtctctatgcagatttcttttgcgaaaactacctttatactatcatgatttgttgtcaattcattaaaaatcaatgagcgtagaatgatagatggtatgaaagttgcttttcctataatcatgctatcataaaacaagcacatttttttcgaaagcatatgacttattttaaagtaattacctacttgtctctcttgacatccgggtctcaccacctttcatatccaggtcctgcgaccgtacagatgggggtggaatcttgttaaaacgagggtatttgtgaatagatctgcctgtttttagttaaattagtccgtttcttttggaaaaatcccaaagtggcagacaactatgattgtggaatgatagtagcatgatagtcaaatttgctactatcattcctatacttattgatattcaatagatatattcgaattatgatagtatgatagtccttttcgaaaacttatgtaagaagaaggtcttctttttgccgaatggagaatctttatctgccgtttaccacgaaatttcgtatctggcattccgttccctgtgaggcggggttcttctttttcgatatgcggagaaccagtttgtgatccgtgtctttcagttccgtttccagcatgtagacccagggaatataaagattgtggctccattcggtgaaagtatccagttctttgaacggggcgccgtcgacactatattccaagattccggcagaaggtccgctgacgcagaaaataccgatcgctttcccccggaaatccagtgttagttggtctcctggacgtgtagcttctaacataggaacatcgacaaagccgttccgcttgccggccttgttgtcgggatgccagttgtctactaatttccaacctttgttcaagtgggctttttcgagagcgatgaagtctccgttataataactgtaggcatccagcggcttggccggaatgtcgtgtgccgcaattgtcccttccggcgaaactcctttccacatctcgtcgaaaagatggccgatagcggcagcataaaacttatggccgaaaggtttcggatgagtgccgccgaactcatcccaggtaaattcgccgttttgcatccgttcgccgatctcctggcagagattgatcgaaggaataagatagtgattcgccacccgttcgtgattcaggataacatccggcatctggcggcgggcgatcatcgggataaacgggtcatagatgaaatgcaacatgacgatatccatttccgggttgctttccaaagcatggcgcacttccccttccatgccgcgtatctgttcgagggcgctgaatccgttcgtgtcgtcgtttacggcggcttcgacaaaaagaaggtcgactttccctttcgaaaggatgtcatgttgcaggcggaaggaacccggagtcgtcccggtcgaaccgatacctgcttctacccattcgaactgtgtataagggaaacgttgctgtagttgtcgctctatcatattgcgccatccgtccatttccgtgatggaacctcccaggaaggcaacccgcgcctggcgttctttctcgaatttacggaacgagttttgcaagctgccacgtacattgtaatgtatatacttttcgtactccggctgctggcgaaggatgaagtctactaccggttccggattgtccaaactatgtggatgatggtcgcaccctttctttaggataacttccaccgggcctcctgccgcaaggtagcgtgaacgtacgacatccatgttttccttgtaggggacggtctgatcgctgtcgccgcatacactgatgatcggtatacctgcggctgcaatcggggcgaggttgtcgatcgggttccctttgaaatgttccattcctgcatctgtcaggttccattccttcaacagatcattccacaaagccgtgttttttcttcccggccagctaaacacgtcgcaaacaggagcgtctacatatatacaagccactttctctgtattttgagccgcccagttgaagacgaacaaaccgccgcggctgaatccttccagcgtgactttttcggaaagattataaagatccgtcatattctcatagaattcggtgcccagagaaactgcccttggacttccatatagatgagttacatcgtaataaacaatgtggaaccctttttccagtaacgctttgtccacacttggaaaagcatcgaagaacgccggacgccagatccacggatttcctttggctgcttttttaggaacgacaatggttgcctggcgatccttgaaggtgaaatcgtagcggttgcatccgttccattcgcctgttttttcatgggcttgggcgaccagaccggttatcagggacagaagtaccagataaataatctttttcataataatcatggtatttataaagtttacattggaggggcaaacgtacataaaatgcttattttatgcaaatcaaacctctaagaatcaggggtgggatgtgaaagaaataaaaatacttcgtgtattcgcacacacaaacttgtgtagaacaaaaaaaatgccttatatttgccccgtattatgaaaaacgaatattaatatcatgaacacatttcaaaaagcaagtgagaaaatgacaaattacagatggacaatctgtgcgatgttattttttgcaacaacagtgaattacctcgatcgccaggttctttctttgacctgggatgaatttatcaaaccggagttccattgggatgaatcccattacggtacgataacatcagttttctcaattgtgtatgcaatctgtatgctgtttgccggccgttttatcgactggatgggtacgaagaaaggatatctttgggctatcggtgtttggtcgttcggagcctgtctccatgccggttgtggtattgcaaccgaacattatgtcggaatgaatagtgcagccgaattgattgcagcgacaggagatgttgttgtgatattggcaaccgtgagtatgtatttctttctggctgcccgttgtattctggcattgggtgaagcaggtaacttccccgctgctatcaaggttacggctgaatactttccaaagaaagaccgtgcttatgcgacttcgatcttcaatgccggtgcttctattggggctttggtcgctcctatctctattcccttgttggcaaaagcttggggttgggaaatggcttttatcgtgatcggtgcgctcggttttgtctggatgggtttgtgggtattcatgtacacgaccccggacaagagcaaacatgtgaataaagccgagttggagtatattgaacaggataagaacgaaaaagacattgtcgtcgtcgaagaagaacacgagaagaagataggtttcctacaatgtttcacgtttaaacagacttgggcctttgttgtcggtaaattcatgacggacggggtttggtggtttttccttttttggactccttcttatctgaatacgcagttcggtatcaagacctccgatccgttgggcatggggttgatctttactttgtatgccatcacgatgttgtctatttacggaggtaaactgccgacgatttttattaaccgaagtggaatgaacccatatgccgctcgtatgaaagcgatgttgatttttgctttctttcctttgttggtactgttggcgcagccgttgggtacgatttctccgtggtttccggttatcatgattggtatcggtggtgcagctcaccagtcatggtctgccaatattttctctactgtcggtgacatgtttccgaaatcggctattgcaaccgttacgggtatcggaggtatggccggtggtgtcggttccatgatcttgcagaaggtggctgggaatctgtttgtttatgcagatgctactcagatgacatttatgggcttcactggcaagcctgccggctatttcattatcttctgcgtatgtgccgtcgcttatttgatcggttggactatcatgaagattttggtcccgaaatataaggtgatcgttcttgaatagttgacatagagagtatatagtttataagagaagaaggaggatgtgcctgtatggatgcattctccttttttactataggagagcggctgttttaccggatacgttcaagaatgactggttgaccagtgtttgatcgattttgctccggaaaggaaatctttgcgatcacttaaatcacactttttcgggcgaaggtgaaaggaactttttcctttttatcatgataatatcccaatattttttcttacgtaccttaaagatagagtatttgtatccagagcggaacgaaaaaaaagttttcaaaccatttggaagtttgtattagaagaattacttttgcacccgcattcgagcgagaaggtcggcagttaacatgatgatgaggtagtttcagtgatagcgaggatgaggttagctaggctaagcgaatatccgaccatccgggggctttgaaaaaaaactttcaaaattttccttgaaaagtttgtcagttagaaaaaagttcttacctttgcagccgcaatcgaaacgatagcgcaagttctttgaaagcattacatatcaacaagtagtacaagagacgtagtaggaatactgacataccgtcaagactacaataaacagatagagattctgagcaaaaggtataaaacaaaatcaacaacgaagagtttgatcctggctcaggatgaacgctagcgacaggcttaacacatgcaagtcgaggggcagcatgatttgtagcaatacagattgatggcgaccggcgcacgggtgagtaacgcgtatgcaacttacctatcagagggggatagcccggcgaaagtcggattaataccccataaaacaggggtcccgcatgggaatatttgttaaagattcatcgctgatagataggcatgcgttccattaggcagttggcggggtaacggcccaccaaaccgacgatggataggggttctgagaggaaggtcccccacattggtactgagacacggaccaaactcctacgggaggcagcagtgaggaatattggtcaatggccgagaggctgaaccagccaagtcgcgtgaaggaagaaggatctatggtttgtaaacttcttttataggggaataaagtggaggacgtgtccttttttgtatgtaccctatgaataagcatcggctaactccgtgccagcagccgcggtaatacggaggatgcgagcgttatccggatttattgggtttaaagggtgcgtaggtggtgatttaagtcagcggtgaaagtttgtggctcaaccataaaattgccgttgaaactgggttacttgagtgtgtttgaggtaggcggaatgcgtggtgtagcggtgaaatgcatagatatcacgcagaactccgattgcgaaggcagcttactaaaccataactgacactgaagcacgaaagcgtggggatcaaacaggattagataccctggtagtccacgcagtaaacgatgattactaggagtttgcgatacaatgtaagctctacagcgaaagcgttaagtaatccacctggggagtacgccggcaacggtgaaactcaaaggaattgacgggggcccgcacaagcggaggaacatgtggtttaattcgatgatacgcgaggaaccttacccgggtttgaacgtagtctgaccggagtggaaacactctttctagcaatagcagattacgaggtgctgcatggttgtcgtcagctcgtgccgtgaggtgtcggcttaagtgccataacgagcgcaacccttatcactagttactaacaggtgaagctgaggactctggtgagactgccagcgtaagctgtgaggaaggtggggatgacgtcaaatcagcacggcccttacatccggggcgacacacgtgttacaatggcatggacaaagggcagctacctggtgacaggatgctaatctccaaaccatgtctcagttcggatcggagtctgcaactcgactccgtgaagctggattcgctagtaatcgcgcatcagccatggcgcggtgaatacgttcccgggccttgtacacaccgcccgtcaagccatgggagccgggggtacctgaagtccgtaaccgcaaggatcggcctagggtaaaactggtgactggggctaagtcgtaacaaggtagccgtaccggaaggtgcggctggaacacctcctttctggagctggaatctctagattaagtccgatgaggtatgtagctctctggtactacggttgaatatgtatatatatatgatcttaaactggaaagaccagtatatagagagaaagatgatgctgagatgaaaatttcaggcacataacggttgacagtcctatagctcagttggttagagcgctacactgataatgtagaggtcggcagttcaactctgcctgggactaccagttgaaaaacgggggattagctcagctggctagagcatctgctttgcacgcagagggtcaacggttcgaatccgttattctccacgataaactccgtaaggggtaaaaaaagatctttgacgtattggacaacttcaaaaaagtaaagtaacgaaaaaatagagcaagctgaagatatatcaatccgacacgggcttcaattttagcaataaaaggaagcagtgtcagtgataaagaaagtaagcaagggcagacggtggatgccttggctctcggaggcgatgaaggacgtgataagctgcgataagcttggggtaggtgcaaataacctttgatcccaagatttccgaatggggcaacccggctggtggaaggccagtcattccgtaaggaaggcgaacgtggggaactgaaacatctaagtacccataggagaagaaaacaaaagtgattccgcaagtagtggcgagcgaacgcggaacagcccaaaccgatgatgtttaggcattgtcggggtagtaggaccacgttgtggcaagagattaaggaagtagaacgttttggaacaaacggccgtagacggtgaaagcccggtatacgactctttaacgaagcctagtggaatcctgagtagcgcggagcacgagaaattctgtgtgaatcagcggggcccatcccgtaaggctaaatactcccgagagaccgatagcgaaccagtactgtgaaggaaaggtgaaaagcacctcgaacagaggagtgaaatagtccctgaaaccgtctgcctacaagcggtcggagcacattaaagtgtgacggcgtgccttttgcataatgaacctacgagttactttctccggcaaggttaagggcttcaggcccggagccgaagcgaaagcgagtcttaatagggcgtgatagtcggagtgagtagacgcgaaaccaagtgatctacccttggtcaggatgaaggttgggtaacaccaactggaggtccgaatgggtatacgttgaaaagtgttccaatgaactgagggtaggggtgaaaggctaatcaaacttggagatagctcgtactccccgaaatgcatttaggtgcagcctttatttagtatagcatgaggtagagcgactgattggatgcgagggcttcaccgcctatcaagtccagataaactccgaatgcgtgctatatattgataaggagtgagggcgcgggtgctaaggtccgcgtccgagaggagaagaatccagaccatcagctaaggtccccaaataacagttaagttgaactaacgaagtcggactgcagagacagctaggatgttggcttggaagcagccattcatttaaagagtgcgtaacagctcactagtcgaggagtccggcgtggataatactcgggcataaactgtttaccgaagctatggatgtagaaatacatggtaggggagcattccaacggcgtcgaaggtgaaggatgacctttgctggagcttttggaaacgcaaatgtaggtataagtaacgataaaggaggtgagaaacctcctcgccgaaagactaaggtttcctgatcaacgttaatcggatcagggtaagtcgggacctaaggttaagccgaacggcgataccgatggaagaatggtttaatattcccatactactttatggagcgatgtggagacggagaagtgaaagtcctgccatctgacggaataggtggttgaagagtgtagatgtagattcctgtaggcaaatccgcagggagagtcgaccttgatagtatgccgcgtgcttgcacaaggcaaaatggacgtaatcaggctcccaagaaaatccgctaagcatattcataaagtacccgtaccgtaaacggacacacgtagttgggttgaaaatactgaggcgctcgagtgattcacggttaaggaactaggcaaattgaccctgtaacttcgggataaagggtccctactgagaggtagggcgcagagaataggtccaggcaactgtttaacaaaaacacatggctgtgcgaaatagaaatatgaagtatacagcctgacacctgcccggtgctggaaggttaagaggagagctcatcgcaagagaaggcttgaattgaagccccagtaaacggcggccgtaactataacggtcctaaggtagcgaaattccttgtcgggtaagttccgacctgcacgaatggtgtaatgatctggacactgtctcaaccgtgagctcggtgaaattgtagtatcggtgaagatgccgattacccgcgatgggacgaaaagaccccgtgaacctttactatagctttacattgaatttgggcaatcgatgtgtaggataggccggaggctatgaatcaggcacgccagtgtttgtggagccgccgttgaaatacggccctttggttgtttgagttctaacccgcagaagcggggacactgtatggtgggtagtttgactggggtggtcgcctccaaaagagtaacggaggcttctaaaggtaccctcagaccgattggtaaccggtcgtagagtgtaatggcataagggtgcttgactgggagacagacaagtcgatcaggtaggaaactagagcatagtgatccggtggttccgtatggaagggccatcgctcaaaggataaaaggtactccggggataacaggctgatcgctcccaagagctcatatcgacggagcggtttggcacctcgatgtcggctcgtcacatcctggggctggagaaggtcccaagggttgggctgttcgcccattaaagtggcacgcgagctgggttcagaacgtcgtgagacagttcggtctctatctatcgtgggcgtaggatatttgaggggctctgacactagtacgagaggaccgtgttggacagaccactggtttaccggttgtaccgccaggtgcaccgccgggtatctaagtctggattggataagtgctgaaagcatctaagtacgaagccagcctcaagatgagatatccctagagggtcgttgtagactacgacgtagataggctacaggtgtaagggcagcaatgtcgaagccgagtagtactaatagcccgagactttcgatcatgtaagggttgatatatcagcaggtggctgatgccatatgtttctattagttacttcaggtaatggggttgtccagtcaaaatcttacaaagaggtattaaggtggttatagcgttggggatccacctcttcccattccgaacagagaagttaagcccaaccacgtcgatggtactgcgtaaaagtgggagagtagatagccgccgttttttaggagtgagagcgaaagttctccgtgaaggaagccgattcagttttgagtcggcttttttcgttcccgacagcccattctttagagatcgtgtttttggatggcgagtttgtcctccacgacgttatgtttgatttgcgtgtaatgctcgtattgtaatgtcccaagatccggcagcacgaatggggggataaatgatccgaccgttcagtggagaaagcccgacttggatcagaattctacactgggagtatagaggacacgcggtgtacgacaagaggcttaagtaaggccgttcaatgaagaggattaaccagccttacaaatggaaggcatatcgtctgaaaagcaggaatccagaatccgggattccggaagatgcattctaggagcgggagggtctgataaaaaacggggcctctcagtgttgagagcccccgcataaaagatcttattaagatagcaaacgcttcgattaacaaattctttttttgaagtcatagtcaaggttacatattttttcttagtcaaggacttggatgcacaaacgtaggcattccttttttactatgcaagtatttgtttgtttatttttgaaacaatcggattttactctctgagttattggaaaaagtcggcatgtcgaccgttatcgtggtcacttgatggggcgtgacgggatatgagcatgagttttgcaatggatatattttttcattatatatatttgtcaatattctgaattgattttgttacttactgaaatactctttctttatcgtttaatatatatatattgactgaatattttgatatgaaaaaggagtaaacattatgggatatctttaaggaaatagattataaaatcgaatatatttgtttagctgtaggatgtctctgataaataataacgttttagtgatagaattatcaaataagatatttatcttcgctatccaaatctaaatgcagaaaaacatttaaaatgaagagaagaatgtttcttaaatcatcactattaatgacttcaggattaggttttgatacttatgtgagagaagaggtcagagaggagagagtgcaggttaaaaagccacacgttatcctgatcatgactgatcagcatcgtggagatgctctcggctgtatgggaaattccgctgtcatatctccgaatcttgatcgtttggcgaaagagggaactttgtttgtaaatggatattctgcttctccaagcagtacacctgctcgtgccggactcttgactggcatgtcgccttggcatcatggcatgctggggtatggtcgagttgcagaaaagtatacgtacgagatgccgcaaatgttacgtaatctcgggtattatacatttggtgttggaaaaatgcactggtttccacaaaaggctcttcatggctttcatacaacattgattgatgagagtggacgtgtcgagtcgaaagattttatcagtgattatcgggaatggtttcagcttcatgcgccaggtgagaatcccgatttgacaggcattggttggaatgctcatggggcaggtatctataaattgccggagaagttgcatccgacggcatggacgggtcagactgcttgcgaattgattcgaaattataattgtgataaaccccttttcttgaaagtttcatttgcacgtcctcatagtccttatgatcctcccaagcgttatctggatatgtataagaatgccgatatacccaagccgtctgtcggtgattggtgtggcaaatatgcagaacgtctggatccggaaaaagtggctccagatgctcctttcggtaattttggggatgaatatgctgtcaaatcccgcaggtattattacgcgaacattacctttattgacgaccagatcggagaaattattgcggtattgaaagaaagaggaatgtatgacaatgcggtaatttgttttacggccgatcatggagatatgttaggcgatcattatcattggcgaaagacatacccttatgaaggttcgacccatatcccttatattgtgaagtggcctgccggaatgtacaaaaaggttcctttgggagcaaggatcgaacagcctgtcgaacttcgcgactttttgcctacctttatcgagttggctggtggagctgtacctcctgatatggatggcaaatctttgttgaagctggttcagggccaggaaagtgaatggcgtaaatatctggatatggaacatgccacttgctatagtcaggataattactggtgtgcattgacagatggtaagatcaaatatgtttggaatttccataccggaaaagaagaattgtttgatctccggaaagatccgaacgaattggtggaatgttccggcaagccggcttatgctacccagcttaaggaaatgcgccaggcaatggtcgatcatttggcagagcgtgacgaaactttcgtgaaagatggaaaattggtggtacgggagacaacaatgctttatagccctaattatcctcaaacaaaatgattcgtataaattctttaaactgtgtatgctatgataagaaaatggaaactcctgcttgttggagtgagttgtgtaatgggtacagctatggcacaaaataatcctattttgctgtttccgaaaggtgcaccaggcgaaacaaccaagttgattgaaaaggcagatgctgacggtgggaagacaggaggcgagacggttcttcgtatcacgaatgtaagtgaaccgacaattaccgtttatccggcccccgacgaagtggcgacaggtgctgccgttgtggtttgtccgggtggtggctataatatcttggcttatgacttggaaggcgatgaagtttgtgagtggttgaataatttgggagttactgccgttttgttgaaataccgggttcctcgccgcgagggtcgtgcgaaacatgaagctcctttgcaggacgtgcagcgtgcgatcggatatgtccggactcatgcggaagaaatgaacctggatcctcagcggatcggagtaatgggattctctgccggcggacatctttcggcgatggcaagcaacaatttcgataaacgtacttatccggccgtggatgcggcagataaggcaagttgccgtccggatttctgtctcttggtttatcctgcctatctggatggtgaaaatttccagttggctccggaggtcaaagtatcttctgccactccccctacaatgatgattcaagcagaagacgataaatcttatatcaacagtagccttttctactattatgctttgaaagaagctggtgtgcctgcatggatgcatctatacagtaaaggcggtcatggttatggcctgagagatacgggtgcagctgtaaatgaatggcctgacagggctgaagactggtttcgcgaaatcggtgtgatagaataaaaaactaaatagagtacaaagattttcgatttttctgtatctttgtactcacaaatcatggggatgaccggtttagacagcgggtagaagtggtttgtaagcatgtagtgcgtggtcggcttgcacttaaatctcagacggcgaacaattaactggcgaaaacaattacgctctcgctgcttaatcgaagtacagtagattcaagcttaatccctgcaaaagttgcggggacgtgacatcacccggatgctgtggctccgaagcgttccgatcaggtggtgcagcaatatcggagatagtttggagtaagtctcgggctccaagtgaaattttagaggataaggttcaagtgggtggcttcggtcttgcttgcacccgacaatcgaaggcgaagataaacatgtagaaagcagattaattcctcgtttggacgagagttcgaatctctccatctccacagaaaaggctagcagtttcgactgcaggccttttttgtgatcaatctttatcgattaattggattccttcaggatcgatattgattatcttttgtttgtaaagagccccgattgcctgtttgaatgcttttttgctgcagcgaaatagagagtaaataggttcggttcactggctgcatatcttccttgagctttgagcgaatccagaattatcttggcaacaccttctgccttttgatatcctaaggggggtaaggctgacatctatattttcgtattctctgacttctttgatgtaccctttttaatgttccccttttcccaagcgttgaaaaacatctggtagctcagagtattcgtccgaaataagtcgcttctttctctgtttgtccgtaagcatagatgtcaaatgaaaataatagaaggaactctgtatgtccttatgcctcatgcttcttgatagagagctatttgcagctgaactcaaaatcatgtttctcccactgcgtgatacttgtggtggcataatgatgacgaaagtcataaggacatactgattccggacttatacgtagttacaaatttttgtgtagcatagtaaaatggtcatatcagtcttacaacggctacgaaaataggacaaagattccatataggaatagtacggtatcgatggggggtacccttttgggtgtacggcttacccagatctattacacttgcattagttctgtgggtgtgggataatgagagcggatataatcctccgatctcttttttgattgaagatcttggataaaatcccagcaaccgtacccaaaggcctgtttattggtttctgctgacgagggataggaccttctaatttggtggtagactttttcactattaggtaatcgaatagctcattactgctataaacattcattggaaaagacagagtctctttagtcttagattgaatcaggtttacaacctcgtttttcccaggtgatcaattagcatttggaaattggattttagataaggattattcataggctgaaaattttgattaatatcaacctataggttataaatgttatccaaactctaaattcataattaacatcttatcaagtgattgcaatatgaagttgggataacatttattgttgctgccaccagtgaatttgccagaattcatcatatttttgttcgtgaggcaaataattatctgatacgctttaatggtattgactttcttacagaacattatgatgcagagcatttgttttcatttgatgatactattcaggagcttacgcaagtttgtctaaataatggagggggcattcaatgaaaccatattacggttctaatactataattgaacagatagacttgtcaaggtgtaaaccttacaaggacttcagacaagggttctatctggcagagattagagaacaggtagaacaaatggtaaatataatattttagctatttaattgataataaaatagttatcatatcatttacaaaaataggtaacggtttagaaacgagtgaaattcaaccgattgttttattttgcatacattcaaagaacatttttgtaacgcaaatataagatttactgctgaaaaaagcaatattacaggcttttactatcccaaaatatcggtcaagggagtcggctttcacgttccccccccccaactataaccttccatccgtcagataaaaccgtgtcttcgtcacttttcaaacaagttattcaattcatattttaaccaataaactttctatattcattcaaatgaagttatcatacccaataacctcgttccattgtttctatttttattaaaatattttgtgtaaatggaaaatacgggatttaaagtgagttccgtattttttattttatacatttaccgaatgaagaagattatgaaagaaaagaatcaagtagtgcctaatgaggtattaagaaaggagttccttagccagttcaaaacagaagccgatgtgagcaagtttctgaagcagttgcatgcccaagtattggaaaagatgcttgaaggcgcaatggatgcccatttgggttatgaaaagaattctgaggcaggaaacaacactggcaactcccggaatggcagttatccgaagaaaatccaaaccgaacgtggagaatctgtcatttccattccgtgtgaccgtaacggccagtttgaaccgatagcagtccccaaacatgaaagtcatggactttctatagagggacatttattaaatattatatcagccaactgatttatatacaaggtgttgcggattggttggctttttgtatctttaggtattcccccgaaaacaaggtttgacggcccaaacaggggaaattccccaactaagatatggctaagatagcaaaaatttcagaaattcaccctactttgggctttacagaatttgatattctggaaaaataccgcaagagttttcatgagagtgggcttggcaggcttcattcgttgtttctgtttgagtgtatggcaaaagccgcaggcctgtctgaacaacgtttgggccgcaggaacatattcagtccttccgcaaagatcgcccttatggtcctgaaggcatacaccggattctccgacaggcaactggtggaacatctgaacgggaacatgcactaccagattttctgtggaatcttcttgaaaaactcttcagtcaaagggatgggatccatagcgagtacggtgctttactccgatatacacaggattaccagaagcgtctttccatcatcggaaaggagcttgtataggaaaaggaaatgtttgaagggcggaaagtcagtgaccgcatcgtcagcattgaccgttattatgtatgtcccatcgtcagaggcaaggaaaccaagtccgtcaagttcggtgcaaaggtcaataatatacagatagacggcatatcgttcattgaacacctctcgttcaaggcattcaatgagtgtatacgcttgaaggactgtatccgtatgcagcagaagctgatgaatgtaagggtgaaacgtgtggctgctgattccatatatgccaataatgccaacagaaagttctgtacaaaatatgggatatccacatcctttgtgcgcaagggaagggcggcccaagatgagcctttgaggaaggtgcttagaagcgaactctcaaaagaaagggctacccagcttgaaggaagcttcggcactcaaaagcaacattactcgctcgcaagaataaaggccaggaataagaagacggaaatcctgtggattttcttcggaatacatacggcaaatgccatactgatgattaacaagatcaggaacagaacggggaaagctgcatgatatgagtttactggaagaatcagaagaggtcatcagacttcttccggagcatcatgtcttgctcgataagagtatatgagaatatacaggaaaatgacaataataatggcatatgaagtgattatactctatcatcttcatatgccatgtattttgtgggaacatttactgaatatccctaaatagagtatttgtatccagagcggaacgaaaaaaaagttttcaaaccatttggaagtttgtattagaagaattacttttgcacccgcattcgagcgagaaggtcggcagttaacatgatgatgaggtagtttcagtgatagcgaggatgaggttagctaggctaagcgaatatccgaccatccgggggctttgaaaaaaaactttcaaaattttccttgaaaagtttgtcagttagaaaaaagttcttacctttgcagccgcaatcgaaacgatagcgcaagttctttgaaagcattacatatcaacaagtagtacaagagacgtagtaggaatactgacataccgtcaagactacaataaacagatagagattctgagcaaaaggtataaaacaaaatcaacaacgaagagtttgatcctggctcaggatgaacgctagcgacaggcttaacacatgcaagtcgaggggcagcatgatttgtagcaatacagattgatggcgaccggcgcacgggtgagtaacgcgtatgcaacttacctatcagagggggatagcccggcgaaagtcggattaataccccataaaacaggggtcccgcatgggaatatttgttaaagattcatcgctgatagataggcatgcgttccattaggcagttggcggggtaacggcccaccaaaccgacgatggataggggttctgagaggaaggtcccccacattggtactgagacacggaccaaactcctacgggaggcagcagtgaggaatattggtcaatggccgagaggctgaaccagccaagtcgcgtgaaggaagaaggatctatggtttgtaaacttcttttataggggaataaagtggaggacgtgtccttttttgtatgtaccctatgaataagcatcggctaactccgtgccagcagccgcggtaatacggaggatgcgagcgttatccggatttattgggtttaaagggtgcgtaggtggtgatttaagtcagcggtgaaagtttgtggctcaaccataaaattgccgttgaaactgggttacttgagtgtgtttgaggtaggcggaatgcgtggtgtagcggtgaaatgcatagatatcacgcagaactccgattgcgaaggcagcttactaaaccataactgacactgaagcacgaaagcgtggggatcaaacaggattagataccctggtagtccacgcagtaaacgatgattactaggagtttgcgatacaatgtaagctctacagcgaaagcgttaagtaatccacctggggagtacgccggcaacggtgaaactcaaaggaattgacgggggcccgcacaagcggaggaacatgtggtttaattcgatgatacgcgaggaaccttacccgggtttgaacgtagtctgaccggagtggaaacactctttctagcaatagcagattacgaggtgctgcatggttgtcgtcagctcgtgccgtgaggtgtcggcttaagtgccataacgagcgcaacccttatcactagttactaacaggtgaagctgaggactctggtgagactgccagcgtaagctgtgaggaaggtggggatgacgtcaaatcagcacggcccttacatccggggcgacacacgtgttacaatggcatggacaaagggcagctacctggtgacaggatgctaatctccaaaccatgtctcagttcggatcggagtctgcaactcgactccgtgaagctggattcgctagtaatcgcgcatcagccatggcgcggtgaatacgttcccgggccttgtacacaccgcccgtcaagccatgggagccgggggtacctgaagtccgtaaccgcaaggatcggcctagggtaaaactggtgactggggctaagtcgtaacaaggtagccgtaccggaaggtgcggctggaacacctcctttctggagctggaatctctagattaagtccgatgaggtatgtagctctctggtactacggttgaatatgtatatatatatgatcttaaactggaaagaccagtatatagagagaaagatgatgctgagatgaaaatttcaggcacataacggttgacagtcctatagctcagttggttagagcgctacactgataatgtagaggtcggcagttcaactctgcctgggactaccagttgaaaaacgggggattagctcagctggctagagcatctgctttgcacgcagagggtcaacggttcgaatccgttattctccacgataaactccgtaaggggtaaaaaaagatctttgacgtattggacaacttcaaaaaagtaaagtaacgaaaaaatagagcaagctgaagatatatcaatccgacacgggcttcaattttagcaataaaaggaagcagtgtcagtgataaagaaagtaagcaagggcagacggtggatgccttggctctcggaggcgatgaaggacgtgataagctgcgataagcttggggtaggtgcaaataacctttgatcccaagatttccgaatggggcaacccggctggtggaaggccagtcattccgtaaggaaggcgaacgtggggaactgaaacatctaagtacccataggagaagaaaacaaaagtgattccgcaagtagtggcgagcgaacgcggaacagcccaaaccgatgatgtttaggcattgtcggggtagtaggaccacgttgtggcaagagattaaggaagtagaacgttttggaacaaacggccgtagacggtgaaagcccggtatacgactctttaacgaagcctagtggaatcctgagtagcgcggagcacgagaaattctgtgtgaatcagcggggcccatcccgtaaggctaaatactcccgagagaccgatagcgaaccagtactgtgaaggaaaggtgaaaagcacctcgaacagaggagtgaaatagtccctgaaaccgtctgcctacaagcggtcggagcacattaaagtgtgacggcgtgccttttgcataatgaacctacgagttactttctccggcaaggttaagggcttcaggcccggagccgaagcgaaagcgagtcttaatagggcgtgatagtcggagtgagtagacgcgaaaccaagtgatctacccttggtcaggatgaaggttgggtaacaccaactggaggtccgaatgggtatacgttgaaaagtgttccaatgaactgagggtaggggtgaaaggctaatcaaacttggagatagctcgtactccccgaaatgcatttaggtgcagcctttatttagtatagcatgaggtagagcgactgattggatgcgagggcttcaccgcctatcaagtccagataaactccgaatgcgtgctatatattgataaggagtgagggcgcgggtgctaaggtccgcgtccgagaggagaagaatccagaccatcagctaaggtccccaaataacagttaagttgaactaacgaagtcggactgcagagacagctaggatgttggcttggaagcagccattcatttaaagagtgcgtaacagctcactagtcgaggagtccggcgtggataatactcgggcataaactgtttaccgaagctatggatgtagaaatacatggtaggggagcattccaacggcgtcgaaggtgaaggatgacctttgctggagcttttggaaacgcaaatgtaggtataagtaacgataaaggaggtgagaaacctcctcgccgaaagactaaggtttcctgatcaacgttaatcggatcagggtaagtcgggacctaaggttaagccgaacggcgataccgatggaagaatggtttaatattcccatactactttatggagcgatgtggagacggagaagtgaaagtcctgccatctgacggaataggtggttgaagagtgtagatgtagattcctgtaggcaaatccgcagggagagtcgaccttgatagtatgccgcgtgcttgcacaaggcaaaatggacgtaatcaggctcccaagaaaatccgctaagcatattcataaagtacccgtaccgtaaacggacacacgtagttgggttgaaaatactgaggcgctcgagtgattcacggttaaggaactaggcaaattgaccctgtaacttcgggataaagggtccctactgagaggtagggcgcagagaataggtccaggcaactgtttaacaaaaacacatggctgtgcgaaatagaaatatgaagtatacagcctgacacctgcccggtgctggaaggttaagaggagagctcatcgcaagagaaggcttgaattgaagccccagtaaacggcggccgtaactataacggtcctaaggtagcgaaattccttgtcgggtaagttccgacctgcacgaatggtgtaatgatctggacactgtctcaaccgtgagctcggtgaaattgtagtatcggtgaagatgccgattacccgcgatgggacgaaaagaccccgtgaacctttactatagctttacattgaatttgggcaatcgatgtgtaggataggccggaggctatgaatcaggcacgccagtgtttgtggagccgccgttgaaatacggccctttggttgtttgagttctaacccgcagaagcggggacactgtatggtgggtagtttgactggggtggtcgcctccaaaagagtaacggaggcttctaaaggtaccctcagaccgattggtaaccggtcgtagagtgtaatggcataagggtgcttgactgggagacagacaagtcgatcaggtaggaaactagagcatagtgatccggtggttccgtatggaagggccatcgctcaaaggataaaaggtactccggggataacaggctgatcgctcccaagagctcatatcgacggagcggtttggcacctcgatgtcggctcgtcacatcctggggctggagaaggtcccaagggttgggctgttcgcccattaaagtggcacgcgagctgggttcagaacgtcgtgagacagttcggtctctatctatcgtgggcgtaggatatttgaggggctctgacactagtacgagaggaccgtgttggacagaccactggtttaccggttgtaccgccaggtgcaccgccgggtatctaagtctggattggataagtgctgaaagcatctaagtacgaagccagcctcaagatgagatatccctagagggtcgttgtagactacgacgtagataggctacaggtgtaagggcagcaatgtcgaagccgagtagtactaatagcccgagactttcgatcatgtaagggttgatatatcagcaggtggctgatgccatatgtttctattagttacttcaggtaatggggttgtccagtcaaaatcttacaaagaggtattaaggtggttatagcgttggggatccacctcttcccattccgaacagagaagttaagcccaaccacgtcgatggtactgcgtaaaagtgggagagtagatagccgccgttttttaggagtgagagcgaaagttctccgtgaaggaagccgattcagttttgagtcggcttttttcgtttccgacagcccattctttagagatcgtgttttgggatggcgagtttgtcctccacgacgttatgatacttcttctggcattatgaaatagttctttgctttaaactattgattttgattgcagaaaatatggtttagtttttttatgtgattcttttttccaactacaaagaatatttcattttcgggattattgatagcgtacagcagtccctgcagcagtaaccattagcatactcccacttcccccaactgtttcgtagtccagatctatggcgattacagcgtttgcacctagttgtgtcgcatgatcgctcatttcttttaaggcggtttcttttgcttcgcgtaatacgctttcgtaagaacctgcgcgtcctccgacaatatcccggatgcctgcgaagaaatctttgaatacatttgctccgatgattgtttcaccggatacgattccgaagtactgggtaatttcttttccttcaatcgtgttagttgttgtgagtaacatagctttttaatttaattgtttagggacaaatataagataaagggcgaaccagtgtactgatccgccctttgtttttatgtttctttatatgaatttatttaaccggttgatcggtcatgataaattccagcttgccgccttttatgatgtcggtgtggctgatgaacagggtgtcgaggattttgccgttcagtttaacctctttgatgtatttgttggctgcactgttgttttttaccaagatctcgaaaataccgccttttacatgaataagcgctttgtcgatcatcggacggcccaatgtatagaccggaattcccggagcgatctgatagaagcctaacgcactcattacataccaggcggacatctgtccgcagtcctcatttccgatgataccgtccggcgcgtttgtgtagaaattttgcatgatctgatccaggcgctcttgccctttccaaggagaatccgtccagttatataaataagccatgtgatggctcggctcgttgccgtgcgcatattggccaatcagtccggtgatatccccggaggcttcttcaccatcaacttgggaagaggtggtgaataatgtgtccaagcgtgtctccagctcttttttaccaccgatcgtggagataaagttgtccatatcatgaggtgcaaagaaactccattgaaaggcattcccttcggtataatcgctcttcatatgggaagaataacggggattgaacggtgtacggaaagaaccatcccccatcaccccgcgcatcatcttggtctccgggtctaagtagcgtttgtagtattctgcctttgccgcatactcttttgccagttccgtatttcctgctttagcggcgatttgggaaatacaccagtcatagtaggccatctctaatccccaggaaacagattcgggaaccgagtcggccgggacaaagccgtatttctccttataataggggtggcgggtaatcaaatccaactcacgtgttcctttgaacttctctgccagatcgtttcggtagacagatgaacgggcgcctgcttcggcccaaacgttcagatcaccttctgccaggtctttagtcactaaatctgccagtacagagactgccggataacctaccatgcaacctgtatagctggaagctaacggccatttcggaaggatccctccttctttatatccttgcacgagcacttttccccaatcggcagcccgttttggttggataatcgtcatcaatggatgcaaagcgcggaaagtatcccaaagtgagaagacagaatagttcacataacctggttccgcccggtgcaccttcttgtccattcctaaatagcgcccgtccacatcctgataggcataaggtgcgatcatcgtgtggtagagagctgtgtagaagttcaccatcactttcggatcggagctttcgatccggatatcgtttaaagctttgttccagatacgtgcggattcagcccgtgtagcatcgaaatcccatcccggcagttcggccagcatgtttctctctgcaccgtccgtatcgacaggagagatcgccacttttacatacagtggtttgttgctctccgcaaatttgtaatggaatgtcagatcgtctggtgtgttgagacgcaagaacagcgaatctttccgtaaatttccgtcgatatactggtatagtgtttcgatcggctccgagaatgtgatccggtaagagacagaatggaaatgtgcccatccctgcgtcctgacagtaccctccaccgtcgaatcgtttacaaaaagatattcgttccctactaacttatgtccccagttcggttgcagcacatgaccgagatcgagaaggacacggcggtccttcggattatcgtatgtgtatttatggaatccgacacggtccgtactggtcaactccacattaattccgaaattgtcgagacgtactgcataatagcctggcgttgctttttccgtctctttcttgaaaatcgcaaccggtttgatcgagtcaccaccggagaaaggtaggatcgccacatctcccaagtcgccgatacccgtacctgataagtgtgtatggctgaaagcatatatttggttgtcatcataatggtatccgctactggcatcccagcccatgatatgtgtgtcggggctgacctgtacaagagcaaacggacgggtagcaccgggaaaggtatgcccgtgaaagcctgttccgataaatgggttcacatattgaatttcatctcgtagttgttcctcgtcggacggttggttacaggctgccagaagtccgaccactgcagcctgaaggaataggattgttttcttcatgttatattatctgtgttttatctcctaaatgaataaatcgttatttttgactttacaaatataaagaaaaagaacaatatacgtgtatgtcctgcttttcttcgggaaaaagttcgtaaaatttgtaactgtccccgtcctcactcttcttttgtgacagagatgagaacggatgaattcataaaacgtattttggctttaaaggataacctgttccgggttgtattccagatcacgggagaccacaatttgtcggaggagatcgtgtaggactctgctaaagatgcattattctatttattcttatcctgactacttcatttatattcgataatgcttatctttgaagcgctaagtctaatttaatcctattttattatgaagacgaatatgggaaaagtatttactacgcttctttgtatgatgatgtgtttatcactttatgcgcaggaatttactttcggtatggttgttggttcgtggaatttttcggctcccgatgctccttacggttatcagaaagggacttgccagatcaagaaaactggtgaaaacctttccgctgttttcacgatcaacgatacggaaatgaccgtgaaggaaatcaagaaagagagcgatacctataaatgcaatttctatgtagatggaacctatgtttcactcactttcatacaggaaggcaagaataaactgacagggaaagcaaatgcagaaggtatggtaatccctgttacattcactaaaatagttaaagctgtccaagcgcgataatctttttttatctatgtttactgtcattggtattatgttcgcgggtattgccgcaggctatcttttgcgcaaaatcgaacttttgcaaaagatcggcaaacctatttcttatacgatccttttgcttcttttccttttgggaatatctgtcggtgcgaataaggatattgtcgataatcttgccacgttgggtggtcaggcattcctgcttgccttggctggtacggtagggagtgtattggctggctggggagtctatcgtctgttttttaaagaaaggagtcgcggatgaaaggaagtctgatcgttgtaggattttttgcgcttggttgcttgttgggatggagtggctggctgcccgatgttgtcattgaaaacgacattacggtatatgtcttatatctgctaatgcttcaggtcgggctcagtatcggtagtgataagaagctaaaggatattctcggcagtattcgtccgaaactgcttttggtccctttggctacgattgccgggacactggtcttttcggctttggtcggtctgttgcttacgcagtggagtgtatttgattgtctggcggtaggaagcggttttgcctattattctctttcgtctatcttgattacccaattgaaggaaccttttttgggtgtccaactcgccacagaattaggaacaatcgctttaatggcaaatatcatgcgcgagattatggctcttctcggtgcgcctctttttgtcaaatatttcggccggttgtctcctatctgtgctggaggtgccacgactatggatacgaccttgcctatcatcactcgttattcgggaaaagaccttgttttcatttcaatttttcatgggattatcgtagattttacggttccgttttttgtgtcgttcttctgctcgttttagatatggttccttttttgttgaaatacgtgacttattttgcttcaaacaggcagaaaaagtgccgaagattcccgtttacaggctttttacacccggatgtgaacggtcttgacacccgagtgtgaatgatatcgagacccgggtgtcaatgggtttatcttattatgttattgaaaataagtaatgtgaagaaaaatgtcggacaggcggttaatgatagtatgatagatgaaataggcatccatcatacctactatcattgcttgggtctattgatattcaatagataaaagacaattagtgatagtatgacagttaaatgtaactatgttttatcccttctgtttatgttcgtagagaaataatgaagttatattatcgggtgaaggcagaactggtaatgctttcgtttggataaacattgaatcttataagtacggcaaaaagtgaaggataagtacgtgaattgcgtacgaaaaagaacggctcccattccgtagcagtggatgagagccgctttgagatcgcacataatattacttttgtacctctttcaacatctcttttaccgcctcttccagctggtgatcttcgcctcttagctgtgattcgggggagttgtagacttcgatgtcaggttcgagttgttggttttcgagatagcggccctgcatatcttgcatgccgacttgcgggataccgaaaacgattgacgggtcaatttgggtttcccaccatacggcagtcatcgttcccggtacgggagcgccgatcagtttgccgattttcaacgtcttatatgtccagggaaaaccgtgggcgttcgaataattgtcttcgcacatcagtacgcatgacggtttcagccatctgttaaacggatcgtttccgatgaactgtccgcgcggagtgaatttagcatacagttctccactcaacaaaattgccaggtcctcatgaagccaaccgccaccgttatggcgcgtatcgacaatcacggcttccttttcgcggcaacgacctaacagctcggaataggtatcgcggaaactttcgctgttcatgcctttgacatgtacatatccgatctttccgttcgacagcttgtcgaccatctggcgcttctgttccacccaacgtttgtaaagcaaatcggattgtgtgccgtaggtgatcggtttgacttgttcttcgaaacgttctttggttgccggatcgtaaacggacagtagtacctgcttgccggctttgccgcttaatagcggatagtaatcttctccactcttgatattcgtgccgtctatcttttcgatgatgcagccaggcttgatcttggtgtcggcttttgtcaacgggcctttggcgatgatttcttcaatcttcaaaccgtcgcctgtgtaattgttgtcatagaaagcgcccaagctagctgttgctggtgcggaagatgcagagcggtagcgtgcaccggtatgtgaaccgtttagttcgcctaacatttcagaaagcatttctgcgaaatcgtagttattgttgatatgcggaagaaatttttcgtatgcctttccatatccggcccaattgataccatgtattttgggatcgtagaacttgtctaatacttggcgccaggtgtgatggaatatatattcgcgttctttcgccgggcgatatgaaaattcggctttgaatgcgatcggtttcgttttgctgtccttgatttcgatcttcttcaactggcctcccgaaacgaggaaaatgttttcgcctttcttgtcggggaacatcgttccaccaccgacacctttgatcagtagtttggtggtgttctccttgaaattgtgttcccataggtcgtaaccgttttcgaatgcggcgcaataatatagcttgtcgcctttctgcgtcaggacggcgtcacctaagaatgacgagttgacggtcaagcgcatgatacggtctttacgattggccaagtcgaatttaagcggttcgaccggcttatctgctttttcgtctttcttgtcatcgtctttatccttgtctttcttgttgtccttgtctttttcgtccttatctttgtcctctttttcttcgtccaacaaagcttgttcctctttggtgaggcggaacttgtcgtatgcttcgccgtcgaagaacatgatgtaaatatcatcttctgctccccaactgccatgactgcgataaccggcccggtcagacgaccagatcatcgcttttccatccagcacccatttggcgttgttgtcggagtagccgctttcggtcaggttggtcatttcgccgctgccgtccgctttcaccaaaacgatgtccgtattgttccatcctccgatcgcgatatatttagcgaggaaccatttgctgtcgggtgaccattgataatattgatcgccgtcggcatacgaataattatatttaccatccaggacggtgcgtacctgtttgtttttcaaattaatcacgcgtagagtcgtacggttttccaagaaagcgacttcctttccgtccggagaatacatcggctggaaagaggtctgcgaatttactaccaacggttcttctttcaattcctgtgcgtatgtgaaatatttgtcgttcttgcgtaccaagctgctttgataaacgccccaggtttcgccccgttcggccgagtaaaccaatgagcgtccgtctgggctgaaatcgagatcgcgctcctgctgcggtgtgttggtgatttgtttggtagtttcgtagtcgaccgaggttacatatacatcgccgcgcacgataaaagcgacttctttgccattaggggaaactgcgatatcggtggctccgcttgccttgagttgatggatcaggtcgttctccaccttatccgagatgatctgtacatccactttcttaggctgtgtaccctctttgaccgtatagatttcgccatcgtatccgtaacagaggttgccgttgttgtcggaagttaggaaacggacgggatgcatggtatgattggttatctgccggctatttctgccggtcaggtcgtttttgaatatattgaaacttcctttttcttcactcagatagtagaaggaagaaccgtctgtcgcccataccggattacggtcttctcctttaaaggaagttattttttggaaggagtgttcccgatcgagggtgcacaaccagatgtcccgtgtgatggaagactggtggtgtttacgccaaggatcttcatatcccttcttgtcttggtataagagtttgtcacccttcttgttcaaagctaggctttccatggcgagggaagaatagagttcggggcgccctccattgataccgatccggtagatttgtggaaattgcccggaggggaattggctgtctttcgcatcctgctggatcgcggccgaatagagaatgtgctttgcatcactgaacgtttccggatattcatttgcggagtgagtggtcaactgtttcgggctgcctccttccatatccatgatgaagatatcgaaatttccgttccggtcagaagcaaacgcgatcttgctgccgtcaggcgaccagatcgggcgcgtatcgtgagccggatgggttgttaactgggtagctttgccaccgtttgccggaacggtgtagatatcgcctttgtaagtaaaggcgatcgtttcaccgtttggagaaattgccggatagcgcatccatagcggatcattttcggccagcacgtttgccgtaaacagtagtgctgaagttaggataaataatgatttcatgctttgcgtttttatgggtgtaaagatacggtattattataaaaaaagatagaaataaacttaatagtagctgtttagtagtttatttctatctttacgaactcaaagtgaggggtgaaagaggtgaatatgcatgaaacagagatacatagcaatactatagaaaaacttaaacgtggttcctatgaggcgttcgatacattatatgatatgtacgcggattctttgtacggtttcgccttgctgcatacgaaatcatctgtccaggcggaagatatcgtacaggagacgttcctcaagctgtggaacatgcgtgcctccttgtctgttgaaggctctttcaaatccatgttgttcacgattgccaagaaccatgtgatcgatgttttccgccaacagatcaaccgtccggattttgaagattacatacgcttttgtgaagacgaacatcttttggataacacttccgtagaaaaaatatattacgatgactttatcgacaagctggcgatagctaagcaaaagctgacccccgcgcagcggaacatttttgaaatgagtcgtgaagagggaatgagcaatgccgaaatagccgctctttcggatatttccgagcaaacggtaaagaatcatttgtccgcagcgttaaagattctgcgtgaggaactccggaaatataattatcttttcgcccttttcatataagaaaactagagaagcttgctttcctttccccaagcggctcttggagttccagatagtttcagcgcttggaactaaaagttcgtacggtgaaacagaaagtttcgctaaaggaaacttcgagcgtattataggggaagaaacaggaatatgctttagaacatataaaaacgcctggtactttttcggtactccttcgtgtaactataaacaagcaacaaattatgaccgatttatttgataaattatattctcaattcttaaggggaaagaccaatcggaaagacttcgagggcttcaaggagtccttgaatcatctttcggaccaggaactggccgaaaggatggaagcgttttggaatgagaatacggtttatccgcctatggaagtctgtcgtaagcgggaatttcatcggagacttcgtctgcagatacatcctcctaaaatctccatacgctggtcccgtatcgtggcggcggcggccgtgattgtcgtcttgtccgttacggcgtggaacttttctcttttgcatgaattgcaaaatgcgaactcttctttcttggcggaagttccggccggagataaggtgcagttgaccttgccggataagagttctgtcaaattgaattcggaaagctctttgtcctacgcctatgtcaacggaaagcgtgtcgcccgcttgaagggcgaggggtacttccaggtttccaaggacaggaaacatccgtttgtcgtgcaggtcggcaatttgaatatcgaagtgctggggacttgcttcaatgtctattcgtatgaggagaatgactttgtagagacttccttgattgaaggctccgtgcgcctctacgattccaagtcgccttctgaaagttttatcctgaaaccgtcgcagaaagcgatctattcgaaaaataatggaaaaatcagttttcacaatacagacaatgtaaaagaaatcgcgtggacgcaaaatcatctggtgttcgaatcggagaagttgggttcggtgttccaaaagatcgaaagatggtatggtgtgcatattgacctgctatgtccggagattgcgaacgatcagatttccggttcttttaaggacgaacaacttccgtatgtcatggaagctttgaaatttcaatatggatttaattataagatcataggaaataacgttacgattaataagcctaatcaatcaaaaataaaataagcctatgggatgaacaggtgaaatctaagaaaaagtgtttttaaaaatcaattgtttaattttaacttaagtctatttatcatagtcatgaagaaagtatttcggagtacagcactcctgtttttgtgtacaaccatgtacgcacaggacatttcgcaaacaatgtcgatgaatttgcaaaatgtcacattgaaagaattttttaagaatctggaggcacaaacttctttttcagttgtttaccgggatattatcctgagtgaaaatcctgatgtagtcgtttctgcttccaatcgcccgttaaaggatatcctgtctcaggtactggaaaaacacggcctttcctacaaagtgagcaataagacgatcgttatcgttaaggcagaagcgcaggctcccgtgaaacagcgaaaaaccaagaaaatatctggtgtgattaccgatgaaacaggtcttccggtggctggagcgaatatcgtagtcaagggaacgactaatgggaccatctcagatatggatggaaacttctctttagaggctgctccgggggaaatgctggaaatatcctatatcggttttttgcctatggaagtaaagatcgataacaagaatacgtttgaaatcctgatgaaagaggatgcacaaggtttggatgaagttgtcgtggtcggttatggtacggtaaagaaaagagacttgactggagctgtcgcctctgtcaatgctgccaagatttcagctgtcccgacctctacggcatcggaagccttgcagggacgtattccgggggttgtcgtttcgaacgccaactggtcgccgggctctactccgaacgtgatgatccgtggtaaacgttcgatcacggcaagcaatgatccgttgtatgtgattgatggtgttcctgttactggcggtattggcgaaatcagcccgtcggatatagagtcgatggaagtgttgaaggatgcgtcggcaacagcaatctatggtgctcgtggtgcgaacggtgttatcctgattacgaccaagcaggggaaatcaggcaagacgcagatcgattataacggatatgtcggggctcagacaattttgaaccagctcgatttctgggatggtccggaatatgccgaatatacgcgcgagtcttatcgcaatacgagcaataattcgatccgctacaactcggatgtggcttcaagggagcaggatatggtttgcccaggatttacacgcgacccgtcgatcatggaatcggtcatgatgggttggggtgacgatggtgtctattatccgtcccgtgtgcgtacgacccgttacatggatcatgtaacccgtaccggtatggtgaccgaccatcaattgagtatccgaggcggtggcgaacggacgaacttcctggcttccgctacttacaataagaataacggtattttcaaggatgaggattatgaacgttattcgatccgtttgaatctaaaccacgaaatcaacaaatatgtgaagatcggggcacagacgcaatattcgcatgccattcagcaacgtggggccggactcgccggtggttggcgtttaagcccgttggcacagttatgggatgaaaacggcgagattattccgctaccgggttcttataatgtatataatacgatgatggaccttgttccgggtgctgtggatcgtccgttgaagactacccgttatttaggcagctattctttggatatcaaactgccagtcgacggtttgaaattccgttcgaatttgggtatcgatgcccgtaccgtgcaggactacgagtttcgttccgccgaaaccagcaaccggggcatggtacttcatacgcaaagaacgcagtggataaatacacgatgtttacgctggaaaatatgcttttttacgataagacgtttaatgacaagcacacgctgggtgtgactttgttgcagtctatccaggaagataaaaaggaaaatgtgaatgttgcaatggagaacctgccggctgataatctgaaatattatgatttagggtcgggattggtgaccaacacgattggcagttcgatgattaaatggaatatggcttccttcatgggacgtatcaattataactatttaggacgttacctgttgacggtttctgcccgttatgacggttcgtcccgtctggctgacggacacaagtgggtgcttttcccttctgccgcattggcatggcgtatcaatgaagaatctttcatgtcgagtacatccggatggttggataacctgaaactaagacttggttttggtaagactggtaattcggctgtagatccttaccaaacgaaaggtacgttgtcgttgatccgttatccgtttgacaatggtggaactccaacgatcggatatgccccgaatgcgatggcgaacagtctgttgacttgggaaacgacggatcagtggaatttaggtatcgatttcggtgtgttgagaggacgtatcaacggtacgattgacttgtatatgcagaatacacatgatttgttgctgaaacgccagttaccggttgtttccggttttcccgatgtgctgtcgaatgtgggtaaaacgcgtaataagggtatagaagtttctatcaactctatgaacatcaattcgaaagacttccagtggacaactgatttgatgctgtcttccaacaaggaagaaatcgttgaactgtataatggcaagaacgacgatattggtagcaaatggtttatcggccagccggtgaatgttcattatgactaccggaaagtaggtatctggcagaacacggagtcagatcttgccgagatggcaaaattcgccgccaacggtacagagtttgctccgggcgatatcaagatacaggatgtgaatggcgactataagattacggatgccgataagcagattctgggaaacccacgtccgaagttgattgccagtatggtgaatactttcaactataaaggtttcgacctgtcggtctttttatatgcgagtttcggcgctatgttgtataacgacatttatgcactggaacattgcggacgtaacggtggtgtgaaagtcgactactggacaccgaataacccgacgaacgcttatcctcgtccgagtatcgatgaggagcgcccgatttacatcacatccacttattatgaaaaagcggatttcttgcgtgtaaagacaatgacattgggatataccttgccgaagaccttgaccaataagttcctggtggagaaactgcgtgtttattttacagcccagaatccgtttatctttaccaattatacgggtattgatccggaagcagctaaagtaaattcggccggtaatcctgaaactaacggtagtggtttcggcactccgagtgtcagttcctggatttttggtataaacttgactttgtaattttaatcttaataaatcaaagaatgaaaatgaaatctgtatattgctatatgctggcaggtctgatgttatctgcttcaagttgcagtagttggttaagcgaagacgatgcaccggtgatgtcgtacgattattatgaaacggaagccggtgtaaatgcagccattacggcagcttacggtttccttcgttggggagttggtggtgaacgtttcgatgtattgaccgaattaggaaccgatttgttcacggaaggggaagatggtagtaatcgtgaatcgtataataaatatgcgacacagttgaatccggacgacggtattctgtatgaaatgtgggaaaatcactacaaagggattagtgatgccaatatcgccatgcagaagattcgggattcccaagacttgttggagagtgtgaaaatacaaagttatgccgaaatgcaatttatccgcgcctatttatattttgatttggtgcagcagtttgggcgtattcctttggtcacggaaggtagtttcgagattcggacggacttcaagcgtgctccgatcgctgatgtttataatgttattatcagtgatttacgtaatgccgccgaaaatttaccggagaaggcttctgttttaggacgtgccacacgttactcagctgcccatttgttggcgaaggtttatctgactcgtggtagcgcagtcaaagatgcgcgtggtcagaaagcgacagatatggatagtacgctttattatgctgagcaagtgatcaacagtggagcttatgctttgcaagaaaacttctcctctctgtgggatatcaagaatcaggggaactccgaagctgtgtttgccgtgcagttcacaaccgagccgatgtttaacggagatggtaacaagcagcatctctattggctgtcttggtatgaagatcagccgggtatgttgagagatattgaaaacggtcgtccgtaccgtcgtcacgtggcaacaaagaaaacgatggacgatttattcgatcgtttgcatgattcacgtttttataagagtttcaaatgggtctactatgcaaataatgtaagcacgctgcctgtttgggagtcgctttcttatgacggaaacgtctattttacgccggatccttctaaagggcaaatagagggcgagttgaaattccagcatggcgatacggcgatttattatacgatgcaggaaacagggcttgcttctaatagtgacgagatgcggaaattgcgtgctgactatacttattcttatttccctcgcgaaatgcattcgatccgttattttccgtcactggtgaaataccttgatccgagccgtccttctgtgtctgaagaaaagggatctcgcgaatgggtgcgtatgcgtttgggagaaacgtatttgttggcagcggaagctgccggtcgtaaaggtgatttcgacaaggctgctgaatatatcaatgtgatccgcaagcgtgccgcttgggccgaaggtgagcaaaaagaccagcagatctggcttttcgaaggtggagtgaacgatacgaagagtacgtatgatgcacttaaagtttctccggctgatctacaaggtgattttatcgaatttattctgaacgaacgcggacgtgaattactgggagaaaccaatcgttgggaagatttggttcgttgtgaactgctgtatgattgggtgaagaaatacaatccggatgcaatctacattaaaccgtatcacaaacttcgtcctatcccgcagaaacacatcgaccgtctgaatcctgttggtgagctcagtgaagaacagaatgaaggttactattgatgtctgtctttagagataaagcgatataaaaagtaggtattagttaaaagtggccggctacaatggaatagatgatattccgccgtagccggctttttctgtgttttttctaaagaaccttgaaaaaaggaaggaggaatatcggatttttgaatcttctgtttatctttgtcgtgtacagtaagcaggataaagcgttatcgctggtacaactttggtggtgaacacgaaagtttatatattatctcttgattgaaacctcgaaatttctagataactagtggatagtatgtgaattttgttcgcgttttttcttgtcatgcaagatgggtgtttatgcacttgcgtattcaagataaaaaacgtgggtaattattgcatacaactagttataggttattcgaggtccttaatcgagtgtatgttactaattcccacgtttctttataataaccatctaattggggaattgttggatatatgggattttttcaggtcgaatttaagtaaatatggaattacctttatctatttcaaatcttcaggagcaatggttgctatcttttttgaaaaaacttgatcctgccaatattactgagcttttttggcaattgcggccttatgtagtcttgcatcatgtggagtttaaggagtcttcgttttctttttcatcagttggtattattaattttgtagatattgtcggttttgtccgtaagaatgatactttgggtattctgttgaggaacggctgtttctatttgttttctgcagtaagtatggaccggcagtgcatattggtttgtgatcctgaattttataagcaaacgggaagaaggttgggaggctggtctctttttgtcgcgaaacggcaattattgtggtggaaaataaaggaatatctgcatcggaatatattttgatgctttactttttttacctttgtcgattgactaaacgataattaggtatgaagaagaaacttatcttttctttattggttttggctggtgtcccttcactgtcgatggcggtggacgaagcgcgtctgttgcgtttcccggctacgaacggtaatgagattgttttctcgtatgcgggcgacctctacaaggttccggctacgggtggcgaagccaggcgcctgacttcgcatgtggggtacgaaatgtttcctcgtttttcaccggacggcaaaacgattgcattcaccgggcaatacgatggtaatacagaagtgtataccatgccggtgacgggtggagaaccgctgcgtgtgacctatacggcaacaaacagccgggatgacttgggtgatcgtatgggaccgaacaatatcgtgatgacctggacgcctgatggcagtcggattgtgtatcgcaaccgcatcagcgatggctttagcggaaagttgttcacggtggaaaaggagggtggcttgtctgaagccatacctcttcctgaaggtggattctgcagctattctcccgatggtaaacagttggcttataaccgtgtcatgcgggagttccgtacctggaaatactacaaaggcgggatggcggatgatgtctggatctatagttccgataagaagacagtcgaaaacattacggacaatcctgcacaggacattatcccgatgtggatcggcgatgaaatcttctttctttccgaccgtgaccgaacaatgaacatctttgtttataatacgaagaccaaacagacggacaaagtcactgactttaccgaatacgacgtaaagttcccaagcgcaaatggcaatacgatcgttttcgaaaatggcggctatatttataagatggatgctgggagtaagaagcccgaaaaggtgaacatcaccttgacttccgacaatatttacgcccgtagcgaaattaaggatggagctgactatattaccgaggcctgcctgtcgcccgacggtgaacgtttagtggtgactgcccgtggcgaagtgttcaacttgccggttgagaagggtgtgacaaagaatatcacccgttcgccaggagcacacgaccgcaatgcgcaatggtcgcccgacggcaaattcatcgtctatatttcggatgcgaccggagagacagaactctatatgcaggatgccattggaggtgaacacgtccagctgacaaaggataatgacacttatatccgcggttttgaactaagcccggattccaaagcggttgtttatacggatcgtaagaaccgtatgaatctcttggacgttgctacaaagcaggtgacgaccttgttgcaggacccgatgggcgagccgcggggagtgactttttcgccggatagtaagtggctgacttatacccgtacagggaacaatgaatatagcatcgtttatgtttataatctggctgaaaagaaagaatacccggtgacagacaagtggtatgattcctcttccccggtattcagtacggacggtaaatatctggtttttgcatctgcccgtgattttaatccgacttatggatcgctggaatggaaccatgtctataataatatgtacggggtttatttgacgttgttgtccaaagatactccttcgcctttcattgagaaagatgcggaagtcgctgttgctaaagaggaatcaaagaaaaatacatcggttaagaaggaggagacaaggaaagaagagcttgccacttctgttgtcaagatcgatttcgatgggattacggatcgtgtcgtcaagttgccggtgagtccttcctattatgggaatttttattcagacggaaacaaggtttactactggggacgtggcggtacgagagtattcgacttgaaagagcagaaggaagacgtggtggccgatggcgcttctatgggtgtcgaacccggtagcaagaaagtgctcttcttcaaaggtgatgctctttatgtgacggatattccttcgggaaaggcagacttgggtgatccggtgaacttatcgaatatgaagattgcggtcgattatccgaaggaatgggcgcagatttttgatgaggcatggcgggcttatcgcgatggtttctatctagagaatatgcatggggtagattggaatgcggtcaaagcaaaatatcaggtgcttgtcccatatgccaagacacgtctggatttgaactacatcatcggtgaaatgatcggcgaactgaactgtggtcatgcatatgtgaatccgggtgaagtagaacgtcccgacaggataaagacggggctgttaggcgctgagatctcccgtgataagagtggtttcttccgtttggaaaagatcttgccgggcgcttcctggagcaagtcgttgcgttctccgttgacggagccgggcattgaggcgaaggctggcgagtttatcgtggcgatcgacggtgtgccgacaaacagtgtgaaagacatgtattcgttgttggtcggcaaggctggtgtcccgacggagattttgttgaacagcaaaccgcagttggagggagcacgcaaaaccgtgatcagtccgctggaagaagaatattctttgtatcattataactgggtacaggataatattaagaaagtcgacaaagcatcgaacggcaagatcggctatatctatattccggatatgggaccagaaggactgaatgaattctcccgctatttctatccgcagctcgacaaggaaggtttgattattgacgaccgtgccaatggggggggggaatgtttcgccgatgatcctcgaacgcctttcccgtgaaccgtatcggttgacgatgcgtcgtggttcagcccgtatcggaactgttcccgatgccgtgcaagtaggtccgaaagtatgcttgatcaataaatattcggcttccgacggcgacctcttcccgtggggcttccgtgcgctgggattgggcaaactgatcgggactcgtacgtggggtggaattgtcggtatcagtggctcgttaccttatatggacgggacggacatccgtgtacctttcttcacaagtttcgatccgaaaaccggtagctggattattgagaatcatggtgtcgatcctgacatcctgatcgataatgatcccgtcaaagaatggaacggtgaagaccagcaactcgaccgtgccattcaggaggtcatgaaagaactccagaaccgcaaaccgcttccgggagtgccgacaccgagagactttagtaaataattgacaattaacaatggacaattggcaattaaagaaaggccaatgaatgcttttcttgattgtcagttgtccgttggattaattgtcaattgacaattatcaattagaaaagtatggaacgctttgccgcaattgactttgagatcgctaatggaaagcgcagtagtatttgctgtatcggggttgctattattgaggacaataaggtaatcgattctgtttacacgctggtccgtccctatccgaacttctacactcggtttactactgccattcatggcataaccatgcaggatacaatcgactctcccgactttgaggaagcctgggccaggatagccggcagattgcaagatatcccactggttgcccataacagttcttttgacgaaggttgcctgcgggcagctcacgaagcctatgaccttgcctatcccaaatatcagttttattgcacctgccgtttgtcgaggcgcatgtatcctttcctggttaaccaccaactacagactgttgccgctcattgcggatacgatctgacctatcatcaccatgcaatggctgatgcttatgcctgtgctcatatcgcggcaaccatgatgcgggaaaagggagtcgaaaggctgtgtgatttatgacgaggcagatgtgtgagaagcctacggctgacttgtcccagtcttttgcttgccggcgatcttgtctaccacgactgcaatcgccccgtcgcctgtcacgttgcaagcagtcccgaaactgtccatcgcgatgtaaagggcgatcatcagcgcctgtaatgtctcgttaaaccctaacatgctttgcagtaatccgagtgctgccatgatagcgccacccggtacaccgggagctgctatcattgtgatccctaacatcatgatgaatccggcaagagaagtgaaggtgacgggttcgcctgacatatacatgattgccatcgcgcaggcggtaatcttcatcgtgctacctgccagatggatagtggcacaaaggggaatgacaaagattgcgatgttctcccgcaccccgttcttgaccgcctgagccaatgttacagggatggtggcggctgaggattgtgtccccagtgcggtcgcgtaagccggaagcatatttttcagtagtcgcaacggattttttccactcatgctgccggcaatcgtaaactggataagtaatagcaacacatgcaggacaaatatcacgattatcactttcaagaacatggtaatcacgcccatgacttgcccgctcaccgtcatgttcaggaaaatgccgaagatgtgaagtggcaataaagggatgataaccgcctcgatcagtttcgtaatgattttctggaaatcggaaaaggattcgcgcaatgtttccccattaatataagacaagccaagcccgatggtgaaggatagaagcaaagctgtcatgacatccatcaaaggtggcatggcgactataaaatagggttgcaacatgaagtcttcgggattttccattgctgttaactccgtgttgaccggtaggatatgtgggaagattgccgaactgctgaaataggtgaagaaaccagagaagatagttgagccatatgcgatcagtgcggtcaaggccagcaatctgccggcccctttgcctaattccccgatggctggtgtcaccaaccctagaataatgagtgggatcgaaaacgacaggaagttgccgaacaaagaattaaatgtaacaaagatgcgggcgatcccgccgggcaggaactgcccgaatacaacaccggctgcgatggcaatgacaaccttagccagcaacgacacttttagctttttcatttttcctttttattttgaacccgatcgcagcaatcgtgatgctcatcaacgggctgattagattaaagaaacaataaggaaggtagatgaatgtcgcaactccgaggatcgttgcctgtgtcataccgcaagtattccacgggattagtacggaagtgacggtgaccgagtcttctaccgtacggctcagcagacggctttcgtatcctttcttttcataaatatccttgaacatatttccagtcaagatgatggaaatatattggtcggccgtacagatgttgaggaacagtcccgatgcgacagtcgacgttaccagcccgactgtccgtttcataaagcgcagaaatacggaagtgatgctgcccaacattccgcttgccgccatcgccccgccgaagcacatggcacaaaggatcagccaaatcgtattcatcatgcctgacatgcctcgcgtggcaatcaggctattcagttccggatttccggtttttatgcttgtactgccgtaaaatgtcattaataggcccttaaaattggattggatgtttcctactggtaaaccggaaatttccagcaacaggtgtggctggaaaatcagcgcgaacatgcctgccaatgccgccgaaatgaacagcgtgatgatcgatggaactcttttcgcaatcaggatgccagtgacgaccggtacgatcagcagccacggtgtgatatggaacgtattgttcagggcgatcgagtactgttcgatctggtctgttgccgtcgcttcgtgtgaaagaccggctaccgtgaagataacgagcgtgatcaacatagagggaactgttgtgatcatcatgtagcggatatgtttgaaaagaggtgtgtccgttaccgatgaggcaaggatggtcgtatcggaaagtggagatatcttgtccccgaaataggcccccgaaatgatcgccccggcaatccatccgtcggagaagccttgtgcctgtccgatacctaagagggcgatcccgatggtggcaatggtagtccatgaacttcccgtcatgactgagacgactgcacaaatgatacaagtcgatgccaggaagaaactaggatgaatgatctgcatcccgtaataaatcaaagtggggacgacaccacttatcatccagctgcccgacaacgctccaatgatcagtaagatgatcagagctgtcgcaacgccagtgatattgttgatcatcgctagctccagcaccttccagcgtactttgctgtaggtcatggcgatcaggcagcagatggcggtagcggtaagtaacacgatctggctgccgccactaagggcatcgctaccgaatatgcgtattgtcacaaataaaagggttaccaatacaagtatgggaaccaaggaaagtaagggcgaaggaatcttcgtcggattatgctccattctcaataatacttaattctatgtgtttactttgcaaatttaatagaaaagctctgaagtgtttctattatgtaagtgattttaagaacgtattaatgattttgcagtaataactccttcaattctttcaccccttccgatgctcctttccgtatgaagcggatatcgttacgataggcttttacctctttcgggtcgatgaggtagattggctggccgtggcgtacgtagttcagtagtccagccgccgggtatacgttgagcgaagtcccgatcaccacaaagatgtcacaatcttccactagtcggattgcaggggcgatcattggaaccgcctcgccgaaccagacgatgaaggggcggagttgtactccatgaggatccttgtccccgatatgcaggtctggattttcgggcgaaatatcgtatgtcgtattcaggtcgtgaacggagcaagctttcagcagttcgccgtgcagatggatcacatggctgcttcccgcccgttcgtgcaggttgtcgatgttttgcgtaatgatatggacgtcgaattcttgttccaagtcggcaagtccgatatgtccggcattaggtttcgtgttcagtaattctcgacgtcgttggttataaaagttgagtaccagttccggatcggcagcaaaaccttctggggttgccacatcttccacccgatatttttcccatagtccgtccgagtcacggaaagtcgaaataccactttcggcgctcatcccggcaccggtcagtacgactaatttctttttcataaggctgttgttttatattttttacaaatatagaaaagaaaaattattccggtttcccaacattctctgattttaagtagcggagtggtgtattaggatgtttttatatatagttcgggcatggattttatgtaatccatgcccggatcagttctgttcgtaagcgatatttatctgttatcctaaattgttcagaatatcgactttgccttcattcaccaaacggtagatcatttcaccgaacaacgtgttgacccaggcgaaccaggaacgggtaaacttgctcggatcatccttatagaacgattcgtgcataaatcctgtatctgcatccgtgtcgcgcagcatcttgacgcatttgcggatttcctcgttgtcgtgtgtcgtattgcagcgcatgatgatactcatcggccagatatatccgaaaccgatatgcggcccgccgataccttcgcctgccttgccttggaaaaaataaggatttgcattgctgagtaccagcttgcgggtgttcaggtagactggatcgtccatgtccacacagcctagatacggtagcgcgagcaagctcggaacattggcatcatccataaacacatggttgtagaaaccatctacctcgaatgcatatactttaccatattcaggatggttgacaataccgtatttctcgacagcagccgctacctcatccgccaatgaatcgcaacggcgggcaaaatcgttatcatttttgatctcgcgcatcatctcggctaactggcggagtgacgtgatggcgaacaagtttgacgggatcaggaatccgaacagagttgcatcatctgacgggcggaacgatgaaacgatcaggccgactggattgaccggactgccccaaccgtcgtttagtaaggtatcgccttggcggtctgtcttgcgtctgaattgatacggaccgaggttgtccttacgctgttgttcgataaaagttttgtaaatgttcttcattgctttgtcccaatcggcatcgaaaggggaagtatcacctgtttttttccaaaaatggtaggcgaggcggatcggatagcaaagtgagtcgatttcccatttgcgctcatgcaattcctttttcatatcagtaaagtcgctttcccattcacttccggtcggtccttcgttgaagccgttagcatacgggtcgatgttgatacaccaggtctggcggttgatgacgccggcaagcatagttttcactttcgggtcgtcgttggcgaactggatatgcgggaatacctgtgctgacgagtcacggagccacatggcgtggatatcaccggtcaggacgaaggtgtcaggtttaccattcaccatcttgtgttcgcaagtcgtatccaatgtatttggaaaacagttttcgaacatccaggcgagcttcgggtctttcagcttggcctttgtggtggcgatcgctttctctacggcttcggatgtgaattgccgtttgctcggtaccggacgtttacagacatattgggtggtggaagcagccccggctaatttgtcgtcggctttttcagccatacgggcgaatgagtgctggccaaccataaggcttgccaacgagaggccgcctgttttcagaaagtttctgcgtgttgtcatctgtttgttatttatttgatgttattgatttcggaaaaaagttcgaccatgcaggcgttatccaacagccatttatgctctttggtcttgataccggtccaatcgttgtcgaggaatccgtttacgtcgcgggtatgatcccatgcataacgtgcgttgtctgccatcgtccggatatattcgggattatggtctacctcatagagggcagtcaagccacgcagcaggatcacgttgaaccaagggctggcggtgtagaagcgggtttccgtaccgtctacggctttgcgcacttcggtgaaacgttggtaggcgcctcgggcggtttcctgtgcgtctttcagataggttttgtctcctgattgcaggtagagcaggacgccggcttgtatcatctgtccgctgttgtaggtatattttgccttgtccacgcttccgtccaagaggacattatcccaataaacgaaatcttccgggtcgcggaggctattcttggtccagtcgtatgtcttcttggcctgttcgagataggcattatttttcgtcaggtagtatagtttcatgcagaggacggttgcgggtgcattggagcatgtgttcttggacgttttcttttgctcgcaccagtaaatgccgccacccagtacatcgtcccatccgctgtatatataattgtatagtgtctgtgccttctccagatatttcttatttttcgtcagtgcgtacaagtcgcagaaatcgatcgccagccagtcgttgtcatcataaaaacggtcgctttccccgttaaacatcggatagctctgataacagaacggttcgcgtatgttatcccaatattgttccagtcccggcagaatcctttcttccagcactttcagatatttcttgtctcctgttgtcttataaagtgcaatccctcccgacagcatcccggagtagggccagaggaacgatacctcctgattgcgtttctgctcggccccttccgccagatatgtgacctgattgtcgggattggccggatacgtttcttgcaacaatccgtatctttcgacgttatatttgtccaggatgtgggtgaacatggaatcggcgatagcgagatcgcgaccggaagaaacagtctttgttgtgtattggcaggaggtcgctcccaataggcatccgcaaagggataaaatcgaaaataattttttaatcatggtctaatagaataagttattttttgcaaagatactattcttttgaaaaaacgaaactctgatggtatgcaaataccgctgaggtttgtttttgtgtacagctttcgtctttattatcaaaattacactactattccttcttttttgagttgatagggtatctttcgaaaattacttgctgtggtaatgttttttaacattttaattgatagtaaatctttcttttggactgtcgaaatgactgaatgtgggttcggatagtcccgatgtgagactatcatgtctaagatgagttatcgttacataaaaaagtcttcttgtttggtgtttatgtggttaaaagcattacatttgtggttcataattagttgaaaagaaaaagaatggataagattagttacgcacttggcttaagtatcgggaataatttccagaactcgggcattaataatcttcaggttgaggattttgtaaaagggttgaaggatgtgctgagtgaagcacaaccggaaatcagttacgatgaagcaaagcaggttatcaacgactacttcatgaatcttcagaaagaaagactggagcttaataagaaggccggagaggaattcttgaatatcaataagggaaaagccggagtcgttacgttacccagtggtttgcagtatcaagtgttgaagcaaggtgaaggagccaagccgactgcttccgacaaagtaaaatgccattatcatggaacattgatcaacggaacggtatttgacagttctgtacagcgtggcgagcccgctgtgttcggagtgtcgcaagtgattccgggatgggtggaagcgctgcagttgatgccggtaggttctaaatggcgtcttttcattccttccaatctggcctacggcgagcatggtgcgggcgatgcgattgaaccgaacagcgcattggtttttgacgttgaattgttggacatagtaaaataacataatagagaaaaatgaaaaagattagtgtattggttgctacagtgattgtagctatgggtattacatcatgtggtgattcacataaaagcgcatctctgaagactgccgcagatagcgtgagctatgccatcggtatcagcacaggtgcaggttacaaagaaaatttgaagactttgccgggcgatcctgctaacgttgatgatctgattgccggctttattcaggctatcaagggcgattcttccgctatgaagatgactccgcaggctgctcaggcttatgttcagacttacttcatggaagcctctgcaagagatgccaagaagacgaaagaagaaggcgaaaagttcttggctgaaaacaaaacgaagaaagacgttatcacgactgaaagtggtttgcagtatcaggtagttacggaaggtaaaggtgcaaagccgactgccgacgataaggtgaaagttcactacactggtactttattggacggaactaaattcgacagcacgatggatcgtggcggtgaaccggcagagtttccggttggcggcgtaatcaagggctggacggaagtgttgcagttgatgccggtaggttccaaatatatcgtttgggttccttctgagttggcttatggcgaacgtggcgcaggacaggatatcaaaccgaacagtacactgaaattcgaaatcgagctgctggatatcgtaaaagacagcactgctgacaaaaaataataaactgtcgttttatactgtaattggcgggcgaaatatgttaaatagcatttttcgcccgcttttattatttatttcatacttttttctttcacaatgatatagtattgaaattaattatatacttttgatacattaaatctaaaaaaggaaagtaaagtaagcaagcaatggagaagatagacaaactggaccggcagatattgaacattatttcaaagaatgccaggattccttttaaggatgtggccgaagaatgcggtgtttcgcgtgctgccattcatcaacgggtacaacgcatgattgatatgaatgtgatcgttgggtcaggctatcatattaatccgaagattttgggttataacacatgtacttatatcggtgtaaaactggaacgaggttcgatgtacaaagacgtggttcccgaattcgagaagataccggaagtggttgaatgtcattttacgaccggaccgtatacgatgctgatcaagttatatgcacgcgacaatgaacatttgatggagttgctgaacgcgcagatacaggaaataccaggtgtgaccgctacggaaacgcttatctcgttgcgccagagtgtaaagcgtgaaatccctatttgtgatatttccgaataagagaagatagaatatatgagcccggcctcgaatgagttgccgggcttttttatatgccatacaatttatatttttgcagaaaaagataaagcaacaatgtcaaaatatttgtccatactgtttctttgttgtcttccaacctggttatgggcgggggagaattatcgttttcgtgtctatttgaaagacaaaggggatgacggcttccgggtggaggagcccgaagcctatctttccaggcaagcgatcgagcggagggcaaaaaatgatatcgctgtgacggatgctgattttcccatatcccggtcatatattgcaatgctgtcagagacaggtgcgacccctgttgtgcaaagcaaatggtttgcgactgtcgtggtggaaagtcccgatagtacggtggctgaacagttgcaacagctggcaattgttgattccgtcaagtggatttggaaagggaacctgcgggttccggccgaggaaaagcgggaagatcgttttgtgtcggaggatgaaccgctacataatgaatatggctattcctataaacagatcaagatgctgaatggtactaaattacatgaagcaggttttcggggtgaaggaatgcgggtggccgtaatcgatgccggttttatgaatgcggatcgggtgtcggctttcgattcgctcaggttattaggaacgcacaatgtcgtatttcctggtaaaagtgtgtttgtcggggacgatcacgggacaaaggtcctttcctgtctcgccgccgatattccgggtgtgatggtcgggactgccccgaaagcctcttacctgttgcttaagagtgaggacagcgattccgaatatcccgtcgaggaagactattggactgccgctgttgaatatgcggatagtgccggtgtggacgtgatctcttcgtcgcttgggtattttgcttttgatacggatgaactgtcgtacgaccaggatgccttggatggcaggaccgctatgatcagccgagcggctaacttggctgccgataaagggatacttgtcttttgcagtgccggtaatgaaggaagcggcgattgggaaaagatcacgttcccatcagacgcaggcgggatctttacggtcggtgcgatagataaagataaaaagaaaagcggtttcagttccgttggctttactgccgacgggcgtgtgaaaccggatgccgtagcattaggtacgagtagctgcgtaattgggccgaacggcaatgtcaggtatgcgaatgggacctcttttgccacgcctatccttgctgggatgggagtttgcctttggcaatcattgccctggttgaataacagggagatgatcgaactgctgcatcgctcgtccagtcaatataaacatccggatacggagttaggatacggtattcccgatttctataaagcatataagaaggaaaggaaaaatggggtacggtcaaaataatcagaatcaggagcggcaggcgttttctttgctggagctgaataaccgggtgaaaggggttgtcctgaatgcattcccggagacgtgctgggtgcgtgccgagatgagtgacgtgcgtacgaatgcagcatctgggcattgttatctggagtttatcgaaaagaacgcgataaccggccagctggtagcaaaggcacgcggttccatctgggcgaaaacattccggatgctgaaaccttattttgagatggaaaccgggcagatatttgcctccgggttgaaagtattggtgaaagtgtcgatcgagtttcacgaactttacgggtatagcctgaccgtgctggatattgatccggcctatacgttgggagacatgatccggaaacggatggaaatcatccggcaattaaaggaagagggcgttttcacactgaataaggaattgccgttgccaacgttgccgaagcggatcgctgtcatcacttcgccaacggctgccggatacgaagacttcctgaaccagttggcaaacaacaaggccggctatcctttctatccgaaactgtttccggctcttatgcagggcgaacggacggaagagtccgtgattgcggcattggaccgggtgtaccgccatgccgactgtttcgatgtggtcgtgattatccggggcggtggtgctacttcggacctgaatagttttgattcctatctcttggcggcaaattgtgcacaattcccgcttcctattataaccggtattgggcatgaacgcgatgacacgatcttggatatggtagctcatacacggatgaagacaccgacggccgtagccgagttcctgatcgggcagatggacaaagctgccggggaggtggaagagttacaacaggacgtttgttcgttggcaactgagatcctgtccaggcaaaagaacttcctgcaatcattaggaagtcgtctgcctgtcctggcaataaaccggatcgagcggaatcgttcgcttctccaacggataggcatgcaattgccaacggatgcccatgcatttctaaaccagtgggcatcgaagctggaagcgatgcaggtgcgtttggcaaaccgtgcggagagtagtttggcagagcggagccgttttgtccagttgaccgaacaatttatcaagatggcttctcccgactatgtattgaagcggggttacagtttgacgctgaaggacggcaagatcatcaaacaggctgacggactggttgtcggcgacgaattgataacccgttttgcagacggtgaagtacgttcgaaagtactgaagaaataaatcaaaatcataaatcataaatcaaaaaccccccatcatggcagaaacatataatgaagcagtagagaaactccgtaagatcgttgccgatatagagaatggcgatctggacgttgatattctttctgaaaaggtaaaggaagcgacccgattgatcaaattgtgtaaggagaaactttacaaggcagacgaggaggtcaagaaagttttggaggaactggaatgatgaagagatatgtcttgatagtcgccggaggtcgcgggctgcgtatgggaagcgacttgccgaagcagtttatcccgatggaaggaaagccagtcctgatgcatacgttggaggcttttcaccgctgggatgcgtctgccggtctgatcctggtacttccagaagatcaccaaccttattggaagatgctttgccgggagatcggttgtaaagtcccgcaccggattgcaaacggaggcgaaacgcgtttccattctgttcgcaatggattgaatttcctttcggatgagattggaaatgcagccggaagggatgaaaagatactggtggctgtgcatgacggggtacgaccttttgccgcacctgaagttgttgagcaatgttttgccgaggccgaagtgtcgggagctgctatcccggtcgtgcctgtggtcgattctctccgcgagttttccggtgagtcgagccgcccggtcgatcgttcgcgttatcaggcggtgcaaaccccgcaggttttcgattatgatttgcttttgaaagcgtatgaacaaccttactcggagttttttactgacgatgcttcagttgtggaggctttcggacatacggtcaagactgttccgggaaaccgggagaatataaagattacgactccgttcgatctgttggtggcaaaggcgctgcttgcaaaataaatatttgtatatgctcgatctcgacaaacgttccatcatgtatctgccgggcgtcggcccgaaaaaggcggagatattgcagaaggaagccggtatttcttcgtatgaagatatgctgttctactttccgtacaaatacattgaccgtagtcgtttctacaaggtggcagaagtgactggagatatgccttatatacagatgaaagggcgtatcttgtttttcgacacggtaggtgaagggcgtacaaggcggttgatcgggaaattcacggatgggacgggcacaatcgacttggtctggtttaaagggattaactatgttttggacaagatcaagactggcgttgattatatcgtatttggcaaaccgaccgagttcgggcatatctataatattccccatccggatatagaccctctggatcaagcggataaggttgccaacgggctgacaccattctataatacgtccgagaagatgaaaaagtcgttccttaattcgcgggcgattcagaatttgcagtacactttgttgagcggtttgaactggacgttgcctgaaactcttcctccggatgtcttgaaccgtatccggatgatgtcgtttccggaagcgatacggaatgtgcattttcccgaatcggtcgataaattgcggaaagcgcaattgcgccttaagtttgacgaactgtttttcatccagttgaatattctccgcacttccaacctgcgcaaactgaagttgagagggattgtctttccttccgttggagattatttcaatacgttctataaagaatatctacctttcgaactgacgaatgcgcagaaacgtgttgttcgtgagattcgtgccgatatgggaagcgggcgtcagatgaatcgccttttgcagggagatgtgggaagcgggaagactttggtcgctttgctctccatgctgttggcggtcgataaccattgccaggcttgtatgatggcgccgacggagattctggcaacccagcattatgcgacagtcatggggttcctgaaagatatggatataaaagtggccttgctgaccggctcaacgaaaaagaaggagcggaataagatattgccggctatcgcgagcggggagatccaactcgtgatcgggacacatgctttgattgaagaaacagttgtcttctcctctctcggtctggcgattatagacgaacagcaccgcttcggggtggaacagcgttctcggttgtggacgaaaaatgcggttgtccctcatgtcctggtgatgaccgcgacacctattccccgtacgcttgccatgactttatacggcgatctggacgtctcggtgatcgatgagttgccacccggacgcaaaccgatccagaccgtgcaccgctatgataacaagaaagcgcaactttacgactttctccgtaaggaaatcggacagggccggcaggtctatgtcgtttatcctttgatcgaaggcagtgagaagttggattataagaacttggaagaggggttcgagacattcaaagaagttttccctgaatataaggtatgtatggttcacggaaagatgaaagcggccgacaaagaggcggaaatgcagaagtttatttccggcgaggcgcagatattgatggcgacgaccgtgatagaggttggcgtgaacgtgccgaacgcttccgtgatggtcatcgaaagcgccgaacgtttcggtctttcccagttgcatcagcttcgtggacgggtgggacgtggagcggagcagtcatattgtgtgcttgtctcttcctataaactgagcaacgagacacgcaagcgcttggaaataatggtgagcagcaataacggatttgagattgccgaggccgatttgcgtctgcggggccatggtgatctggaagggacgcgtcagagcggagaagggatagaccttaagatcgcgaacttggcagccgatggacaaatccttcagtatgcgcgtgatatagctcaggatgttttgaacgaagaccccgatttgttatccgaacctaatcggatattgaacgaacgcctgaaaactctcttcgcaaagaaggtaaactggggaatgatcagctaatatgttgtgaaacatgttttgttttaattgtgtgtaaatcaaagggtaaaaagttcgcttttgcttttctttggtttcattgcggaaatttttcgttattgaattttgccggcttatccaaaattacgaactttgacgagataacggtggaataaaccattctatatcatgatttttcatcgtgaaattactgtcgaaagtgataagaataatgaagatacgagcattactgtttatttgttgtaccactattctggtatcagctgttgaagctaagataaaagaagatgaaggagctccgaagcaaatcgttcatattgaaaagatggataagcgtgtttccgaattgatggcagaccgtgttaatatccggaagaatatggaactgaaggaacttgcgaccctcagcgagatcgaaatggaagaaaaggagaacttgatgtttcccgctgatgaattgtacgggtccaattgggagaaccgttgggttgatccgtttcggggagctgcgaaggtcaattttccggattcgtttgcgatagactgttcctcctttgtctatcctatcgccattgattctatggcaaggatcacctctaaatatggtccccgtcgtcgtcgtatgcataaaggaatagatttgaaggtgttgaagggcgatacgatccgtgccgcttttaacggtaaggttcgtatcaaggctttcgaacgtcgcggatatggctattacgtggtgcttcgtcatccgaatggattggaaacgatctatggacatttgtctaagattttggttgaagaaaaccagatcgtacgtgcaggcgagacgatcggattaggcggtaacacgggacgatctaccggttctcatctccactttgaaacccgctttttaggacaagccattaatccggctgaaatcattgacttcgaaaatggcgtccctcatcaggatacttatgttttccataacgtaaaaatcaacgggcgcagaagcaatatctatacttcttcttccgatcggctggtttatcatcgtgtgaaatcgggtgatacgttgggcaagattgcccgaatatatggaaccagcgtgaatgaattgtgtcgtctgaacggtctgaaaagcacgtctgtcttgcggatcggacagtctattcgttgcagtgccggcgcggtcacctctgctaaagccggaacgtcgaaaccggctgcttctgctagcgtaaagcaaaccgtgaagactacggtcgcggcagatgctgcagctgtcgcttctatcaaccagacttctgatgccgggcggcaagaggctactccggtttaccatcgtgtgaaatcaggcgatacgttgggggctattgccgctaaatatggtacgacagtctctaagctttgtgaattgaatggcattacgaaaacgacgattctgaaattgggccgttcgcttcgctgttcttgattaagagttggctgatatgatataaagggctattcgttatgtgcatacggatggctctttttatttccggctaaagtagcctctcttttggtcagatatggatttatccgtatctttgtacggatgtaaatgctaagaaagtatggctgatacgaaggaacaattcgaaaaagtaatatcccaatgccgggaactgtttgaaaagaagttgaaagattacggtccctcgtggcgaatcatgcgtccgcagtcgctgaccgaccagatatttattaaggcaaaccggattcgcagccttgagataaaaggagtgagcatggtggatgaaggtatccgtcctgagtttgtcgcaatcgtgaactatggggttatcggcttgatacaattggcaaaaggatttgccgatacgacggatataagcaatgaagaagcgctggccttgtatgataaatacatcacggcaaccaaagagctgatgtatgccaagaaccatgattacggtgaggcatggcgcggcatgcgtatcagttcctatacggatctgatcctgatgaaactttatcgtacgaagcagatcgagagccacggaggcaagacgatcgtgtccgaaggcatcgatgccaactatatggacatgatcaactatgcgttattcggcctaatcaagctggagtacggagaagaaacagttgaaaattgaaagttggaagtgaagaataagaatgccgttttaaagatattggcagaattgtgccgcttgctgatcggagttgtatttatcttctccggttttgtcaaggcggtcgatccgatgggcggggcgatcaagatcggtgaatacctggcttccttcggactggatatgttgcagccttttacggtattgttgtctttcaacctttcggcaatcgagtttgcgctcggtgtctgtatgctgctgggagtgtaccggcggtatgtctcttttcttatcttgatatttatggcgtttatgacgccgttgactttgtatctggcccttttcgatcccgtatcggattgcggttgttttggggatgcgctggtgatctccaattgggaaacgttctttaagaatatcgtactctctcttgccgctattgttacgtttatttataaccagcgcttgttccagtgctttactttccgggcatattggtttgtcgctttgtatgcttacctgttcggtgtcggtttcgcttattataattacaatcatctgcctgtaatcgatttccgtccgtataagatcggtgcgaatataccgaagttgatggaaatgcccgaagaggctccgcaggatgaatacaagtacacgtttgtgtatgaaaaagacggcgtgaagaaagagttttcgcttgaagactatccggcaaacgacagtagctggacatttgtggattcgaagacggaattggtcaagaagggctatcagcctcctgttgccgctttcaatatttacaatggaaagggagatgatgtgacggaagagatcatcggaaaccccggtccggttttgctgcttgtcgctccgaagctggaagaagcggacgacgagcagatggatgagatcaacggcgtgtatgactatgcgctcgaacatgatatcccgttctattgcgtgacaggttcttcgccggaggcgatcgatacctggagcgacaatacaggggccgaatatcctttccggatggcggacgaggtactgcttaagacgattatccgttccaaccccggtctggtgctgctgaaaggcggtacgatactgggcaaatggcactacaacgatattccggctgaggaagaggtcaaggcggttatggatcgctgcttggacgagagcaatataaaaagtaaagaagatgggacccttgcaaccaacctattgacttttaccgtacctttgctgcttgtttggatgtatgacctgctgcgtttcagacgcaaacggaaagaaaagaaataactatttgtattacatatttaattaattaagtcatgagaaagaatattgttgcaggaaactggaagatgaacactacccttcctgaaggtcttgctttggcaaaaggcttggatgaagctcttaaaggtaaaactcctaactgtgatgtgatcatcggtactccgttcactcacttggcaagcgttgctgctgctatcgacacgaacaagatcggtgttgctgctgaaaactgcgcagacaaggagaaaggcgcttacactggcgaagtttctgctgctatggttgcttctacaggtgcaaaatatgtgatcctgggccactccgaaagacgtgcttactatcacgaaactccggaaatcctgaaaacaaaggttgaattggctttggccaacggtctgactccgatcttctgtatcggtgaagtgctggaagaaagagaagccggcaagcatttcgaagtggtagatgctcagatcaagggctctttgttcgacctgtctgctgaagacttcgctaagatcgttctggcttatgaaccggtttgggctatcggtacaggtaaaaccgctacatccgaccaggcagaagaaattcacgctcatatccgtgctactctggctgctaaatatggtcaggaaatcgccgataactgcacgatcctttacggtggcagctgtaacgcaagcaacgctaaggaactgtttgctaaaccgaacgtagacggtggcctgatcggcggcgcttctttggctgtcgataagttcatgcctatcatcgaagcgtttaattaattgataattggcaattggcaattgacaattattccggggaattcaccggggagtatattgtcaattgtaattgtcaattgtcaattgtcaactgtcaattgatatgaaatatatcttgtctttatgtatattgcttggtgcatctgctttgtccgctcagacggatggcggtggacaggtggaagacatcattgacgccttgcaggaaagagttcccggaaaggggactgttacggtgcgcgggtcggatgctctccgtaacatgctcggcaaacggctgcatggtgagggggtcgaaaagactgatagcgcggcctttctgaaaatacaaggctatcgtacacaagtgttctccggtaataaccagcgtaaatccaaagatgaggctttccggaaagaaaaagaaattaaggaacttttccctgatgtctcgacttatgtgacgtacaatgctccgttctggcgtctgcgtatcggtgatttccgttcgcatgaagaggcttatcacatgcaacgtcttctgatggatgcattcccggcctataggaaagagatgtatatcgttagggaagaagtcaaaatcccattgaattgaaatgagtgaagaagtaaacgagaagactttgctggcccgcgaagagctggccggccattataaaagtattatcaatctgcttggtgaagatgtagaccgcgaaggtctgttgaaaacgcccgaacgtgtagccaaagccatgcagttcctgaccaaaggatatcatgaagatccggcagccgtgcttcgtggcgccatgttcaaggaagaggactacaagcagatggtgattgtaaaggatatcgatttcttttctctttgtgagcatcacatgttgcccttcttcgggaaggcccatgtcgcttatatccctaaaaaatatattacggggttgagcaagattccccgtgtcgtggatatcttcgcccgccgtcttcagattcaggagcgattgaccatgcagatcaaagactgcattcaggaaacgctcgatccgttaggcgtgatggtcgtgatcgaggcacaacatatgtgcatgcagatgcgtggtgtcgagaagcaaaactccttgactacaacctccgacttcaccggattcttccagcaggccaaaacgcgcgaagaatttatgaatctgatcaaacataaccggtaacgatgtcgaagataagaggacaggtcggcatgagtgtcggtgttcttctgcatttctttattttgtcatgtttggggggggggtaaacagacttttcgccatgattcgcgaattgccttcaccgcttatgtttgctttcatcggagagcaagccggatttggtgcatcccatttaagtgacagtagccgtgtttctgttgcaaaacagcctaatcattaaccttttgcccttggtcgaatatgttttcgcccttggtcgaaagccttttcgacacttgtcaaaagccttttcgacacttgtcaaaagccttttcgactaagggcaaaaagcaaaggaatggtagcttttgatgtaattgattgtttgtttgcttattagttagggttgttgcacttttatctttcacttaaatattgtggatgtagtgcagggagacatgactaacttgaaccaagacgagacactgggtgaagccgaatcttgttttctccataaacttatttttatcctccgattaccctgtgaagaacgaacgctataaacaaaacaagcccctgaggacggtaattgccttcgggggcttcgtcgtatattaaatacaggattaaggagggggggatgttagaatcagaaaaccagtatgtaggccctgtatttggtttcttttgtgaccgggcagagagaaatatatccttcttttattttcccgtctttcatttcaagcggataagccttcttcataaagcaatgttgctcgtaggcttctcccggtttgcttgtgtaagtgatgcgcatgtcaccccgggcgttgggagccaggtatttttggctgatgcgcaaagctaccatccccattgtgtagcgcatgttcacttctatgcagggatgtatggcgaattcgccgtttgcttttttgcggtagaccaacatgtccacgcccaagtaaccggtatagatgtttccgtatatctgccggatcgcctctccgacagtttctttcagttgctggaatttgtctccgaagttttcaacaaagaagctttccagatatgtctgttcgcccaatacatttccggaataagctcctttcttttcagctccgaatacggaaagcccttcatagcgtatgttcccgtttccgtctgaataaaattccatcgcgaaatcctggtatttgtccagtgcacattctatgctgacacatccctgtttgttcagtgccccttcgatccaggtacggtcttttgtagtcagtttgcgttccggtagccaaagcagtcccctgccggaagatgaatagggagtcttcagtatgaagggagcattctggaggatcaggtatttttccacttctcttacttttttgcagaatttaggtgataccggtacatccatatcaggtaggagttctcgtattttgtccagacattcggcagcagtctggcggcttgtcaatcgggtatattcttctttccattccgggatcgtaaggttcaggttaccgcttttccgcagtttttcaaaaagagaatggctatgtggggaaagtccccagggggttgcttgcatttcgggcaggctgtccttctgcttttcgatttccttgcgtgagattagcttggcaaacggcctgaactccttcggttgtaaggagaagaaacgaggtgaaacgatctcttcggtaaaaacaaaatcctccgggtctgcataccagacgggaagataggataactccttgatcatcctctgcacgtttgcaggcggagtgtaattttcagagccttgtagtatggcggtttcgtgtcctgggttaaaaaaatgtattttggatttcatactatatgtatataaatagggatataaatgaggcacggattacacggactgcacggattaattatttttctttccgtgtgaatccgtgtaatccgtgcctaatttatatcagtttacgggatttttccgttttattcgaggttctcgtcgatggcatctatctttttaatgatgagtgccatttcgtcttttagcttgtcgatcttgcgttccatctctttgagcaagccgccgccgcctttggaagagatgcttaggaacccgatgttgttttcgtaagtttgaagttcgttcttcatccgttcgtacatgcgcatcagtttttcccgttctccgtaaagtttccctttcccccgttcgccgttgctcatatcgctgagactattgcggaaagtctgcatcttgcggtcgttctggtcgactttaagacggtcgaactgtttgtcgacagcttcgtgatattccttgtaaatcttgtctttttctttaaaagggacatggccgatagcgttccattctgtcatatatcctttcaaggtagcaagtgcttcgtcatggtcggcttcgtcgattgtgttgatcttttcgatcaaagtctttttagcagctaaattcgtttgctccacgctcttttgggaagatacattcttgttcttctgttcgaagaaatagtcgcaagccgtgatgaagcgcttccagacggcatcggaatgtttgcgggctaccgatccgatcgtcttccattctttttgcaaggcgatcatcttttcggttgtgctcttccagtccgtactgtctttcaatgcttcggctttttcacacaaggcttttttcagtgcgagattcttttccatctcgtcctttatattcttgtagaattcgcttttgcggttgaaataaacgtcgcaggctgcgcggaaacgttcgaatatcttcacgttcgatttcttcggggcgaagccgatcgttttccatttgtcctgcaaggcaattacttccttatttttttcttcccaatctttgaatgatttcaaagccgggaaatcgatgttttctatctgttcgcaaatggctgtcttggcttccaggttttcctgttccttcgctttcaatccttcgaaatgctcctgatggcgtttgttgatgattgtggaagcggctttgaagcgggaccagaggtcttcgcgcagttctttcgctaccggaccgatttcgcgccattgctggtgtagtttctgaagctgatggaaagcggatatgacatccggttccgtttgcagtttctcgacggtttcgcaaagagccgttttcatttccaggttcttcttgaaatcgtagtcgcggaactggttgtttattttgatgatgtcatagaacttctcgctgtatatctggtagttcttccacagttcgctgacgtgctcctgcggaacggctttcacttctttccatctttgctggatgtccttgaaatcattatataatttgttgaaatcttcctggctttcggtcaatgctttcagctggtcgatcagttggagtttcaaggcataattggccgctttaacccgttcttcctcggcaaggatggcagcccgtttttctttgtagacgttgagcagttctttgatcttgctttcggtttcgtcttcgggagcgacaaaatccttttcttcaccaccggctgtaaggaatgctttcttcaattcgtccacttcgctccggtggattttgtaataagcctgtttgagtgcttccacctcgttgcgtgtcgcgtctgccgccgctcctaccaaaccggtcagtttctccagaatttcttctttcgacaattttcccgtagtcgcaacggtttcttcacctgccgcaacttcgtctgttttgacttcagcgtccggtgtttcgtttgttacaacttcctccgccgtgttttccggtgttgtttccggagccttagtttcttccaatttgccgttttcttcagttggcaaattagcttcgtgagtgtccttcatattcaatcgcatttaggaaaaggataaatgtatcctatatcaagtcacaaattaaagtaaatattttgggattacagcatttggaagcaaataatttgcaggtagatgttaaattaggcacggattggagcaaattccatgaaatccgtgcctaaatataatccgtgtttgaaattatcctaagaacgagatcaatacgccggcggctacggcagaaccgataacgccggagatgttgctggccatgcaatattgaagcacatggttcttggggtcgtatttcaatgctatctcatttgccacgcgggatgccatcggtacggcgctcagtccggttgctccgatcagcgggttgattttcttctttgtgaagaggttgaacagtttgacgaagaagatgccgcccgctatggaaagggcgaatgcaaggaagcctccgattacgataccgattgtcgtgaagttcaggaacgcctcggctgtcatggtcgcgccgaccgataatcctaaaaagatggtcgccgcattcatgatgctgttcgatgctgcatcgaacaggcggaatgtattggtcccgatctctttgaccaggttaccgaacatcagcataccgatcaatggcaccgcactcggcacgaacagggccactaccgttgtcactacgattgggaagatgatcttcaagacacgcaaatttttgatctccgtagtggacgggtatttcttttcctgttccttcatattgatggatagctctttctttgaacaaagtagcttgactaccagagggatgataaccggaactagcgccatataggaataagcggcaatcgctatcggtcctaacaggtggggggccagtttgatggtcgtgaagatggcggtcggtccgtccgctcctccgataatccctaaagaagccgcttctttaggtgtgaatcccatcaggatggctaccaacagcacggtgaaaatacccagttgggcggccgccccgaatatggacagacgcaggttgcgcagcatcggcccgaaatctgtcaacgcccctacacccataaagatgataggaggaaggaatccggtctttatcagcatgtaatagatgaaattcatcagtcccaactcatgcgcaatgtcatggagcggcatctcccagatgttcttcatcaccccgtgtgcgttgatcatgccgttttcgtcggcctgtatcacccccatatcgcccccggggaagttggcaagcaacacgccgaacgcgatcggaacaagcaacaacggttcatactgttttttgatacctaaataaagcagtatgaacgcaatggcatacatgatcagaaactgcggttcagcaatgatgttgctgaacgcagtcatctcatataggttttgaaatatttcattcattattgtatcgtcattagtacgtcatcttcagaaaccgcatcgccggaagctaggcagatcgcagtgactgttccaccaaattccgcacgtacggcattatatgtcttcatggcttccacatagcaaagcacatcgccttcctttacgacatctcctacttttacaggtgtgtcggaagcacttttcacgaggaagaatttgccttccagcggcgagagcacttctttgccggtaccggcaggagcagcagcgggggcgggtgtcgcggcaggagcagcctgtgtttctgccgggacggcattcgctgtgtctccgaatgctacggttaccttgtaggattggccgttcacatcgacggtcatgacttgcggagttgtcggcatagccattgccatactggccggagcagcttgtgaaggaacggtggcaggctgggcggccgtttgcttttcggcttttctcttggctacgtcggctttgaattccactttggcttttcctgaacggtaggcttcatactgtgccggatgcatcgcatattcgaagagttcttcgtcatcttcacccgtttcccactgtttttcgttcatcagcttgcgatacttgtcgagcgcgtcaggatagttgtcctgtgggttgccttcgaagaatttgcgtccttcggctttcgccttctcgatgatttccggagccaacggacccggcaggcgtcctgccttgcctaaaatcatgtcccagatatcgtcggcgatcatgctccagcgggccttccctttctccatctgcatcacattcatgagcgccaggttcttcacatactggctgaacggagtcactaatggagggtagccgacacgcggccatacataggcaacttcatcgaacagcttgatcaacagctggtcttggctcatgagcggcttgttgttcttgatattgttcttgttgattgtctccaggttcttttcgaggtctgacatcaggcttcccatcatgccgcctggcaggcccggaccgatcagcaacgagttcatcaggcggttcttcgggctgatatacaagccgaggaagtcatccatgaattcctggatcaggctgcggactttcatataagccttcatgttgatttccggcactttgtagccggcgtcttttaacatcgcctgcacggtcagcaggtccgcatggcctgtaccccatgaaagcggttccatgccaacgtcgatgtaatcgcaaccggcgttacatacttctaagatcgaagccacgttgaatccgggaccggcatggctgtgatactgaaccggaatttccggatgttttgccttgatgtttgctacgatctgccccaaagaatgcggacggccgatgccggccatatcctttatacagatttcatccgctccgagttcgatcagttccatcgccatcttggtgtaatattcgaccgtatggatgggagagtgggtgatgcacaacgagcattgcgagatcatccctgctgctttcgcatatcggatggaaggagcaatgttgcgtacatcgttcaatccgcagaatgtgcgggcgatatctgtcccctgtgctttttttacctggtagaacaactggcgaacgtcgtcaggtacgggactcatacgcaggccgttcagcgctcggtccagcatgtgggtttgtatgccggcctcatggaacggcttcgtccattcgcgtacggctctgtttgggttttcaccgaataataagtttacttgttcgaatcctccgccattggtctctacgcgggcgaagcagcccatctcaataatggctggcgctacccgtgttagctggtctacggtgggaacatattttccggcagattgccacatgtcacggaagaccaaactaaatttgatttctcttttcatgatattttatgtataaatgctattataatttctcgatcttaacgactttgccttttccaccggtcataacacttacagccgatacgattgcggcagtagtctggttcgtgatgccggcagccggtgtggatgtagccgtctgtctttgtggtgtcacttgttttttgacaataatctcttcgggcgcatatttgtttaccagtacgatcaggcccttcccaagattgataacgatcagtaggatagcaaaaacagttgtcattcctacaatcattagcaaaagtccagtttctatgttttccatactcattaattgacgggaaagcgtgcggttggtgtggctggcacaatccttcccaagttaaaaattctgctacaaaattagaaaaatgtctgaaactcacttatggattcttcataaaaaatatgaaaagggttcggacttttcgtatctttgcctccctgaaaacaatttgtaattaaatcatgggaaacttctttaaatcactattctcttcttctaaggctgcaacacctgaagaggaaaaaagcaagaacgatcagaaaaatttcgatattctgaaatacgacggtgtccgcgcccagaaaataggacaggtagcgtatgccatcaaatgttttactgaagcgttgaagttgcaggaggatttcgagacgatgacttatctggttgctgcctatacgacggcgaataaggcggaagaagctcttgaggtgctgaaccgcatggtggaacttgaaccggatcatatcaatacgcttctgacacgtgtgaacgtgcttttcatgctggacaaggatgcggacgtgattgtcgattgccggcatattctcgaactggaagagacgaaccatttggcctggttcctgatggggaaggcgaagcggacgacttccgaccccttaggggctattgccgacctgacgaaagcgatcgccttgaaagaagatttcacggatgcctatctgatgcgtgcccggatattgttgtcgatgcagcaggcaaccgaagcgcttcccgatgtggaaaaggccatcacgctggctccggaagaagaaacatcctacttgctacgcggccgtatccatgaagcgatgggcaatatcgacgctgctgcggccgattaccagaatgtgttggagttgaatccgttcaatgacgaggcgacgttgctcgtcggccagctcctgatcacgcaggaacgtctggatgaagccattactttcttcgacgaagcgatcgacctgaaacccgatttcgccaaagcatacgccgaacggggccgtgccaagaacctgaaaggagacaaggagggtgccttcgaagatctgaaaaagtccatcgaactgaaccccgaaggcgacgaagcccggaagctggaagggcagcatacgaatttcaacgatatgtacaagggcgggatcttctgagaaggatgattcagattttacaataaccccctgttttttctatttcaacccgaaaaccgaacgttttcgggttgtctttttgtaagcggaccggaacattttgtgacgtgcagacagcacgtctgcgcggttcgtctccggtacatgtgtttttgtcaatccgaatcttgttttccttgacaatccggaaaaccttaacttccggagagtcgaatatccggatcctgcttggggatggtgcaggaatatggaacgtataaagagcccggtctcagggaggccggcagccctttcccgtgacgaccgtcttcatcgcgctggcgaccgtcttcatgcagggtgaactgcgcacatcagagccatgaagacggtcgtcatgggaattttctgcgcatctcgcggaaaatacctccggaaatgtttgttgccgctgctggagaaaccttttggaaaggtggttttgacagcttttttcttgtttctatgggcattttttacaatattcccaggttgccccgatatttttaccggttcagcgtcaggtcggtttctctaaaaataaaacttattgtcatccctggcttattgtacggtttttcaaaatacccgttagtctgaatcgaaactgtagtgcatgaaattaggttttcaaccctatattttttaagaaactcgtgtttctgcaagatgttgaataacagaaaaatacaaatatatgccttttgaaggggggtattgtgcgttttaacgtctttcgaagtctggtgttctgtgtttcttagatctcttcaggattacttattataagctgatagccggttccccgacaagatttgatttggataaatggcatgggggccaagctttcccgcaagcgcacaatagcagcagagaccgcatcgcgttccgctttaccgatcttttccttttttaaggcatttccgaggatttgtgaatagataatttgaggcgctatcactgattgttgagaattaatcagatgagtaaatagcttcaggccttgcccgcttaaagtcacatgtaggtttttgtatttcaagatgccgcttttcttgtcgaaccgtaatccgaaaggtaaggtcccttctttggaaaaagaacggacaaaagcgacaaccggcttttctacaatttttgtttctacaactttcttttcaagcaataccgcgtttagtttttttattccccatttataactgccgtataaaattccgacaaataaaccataaaagagtaaaaagagaaggatggaatctgcccgttttaaaacaaaggaaagcggaatttgcacaaatgcttgtaattctatattgtcttctatatttttattcttccgatatataactggcttcaaagcggtagcttttttcataaaaaggctatcggtgtaacttatcgttgttttttctttacgcttacaacgcaccgctgtttgtgtttccatacctaaatctgcaagtctggcgcgaaaaaggctatccagaaaaatccgattcggatcattcagagacagatagtcctggtcacaccatctttctttttcttcataggaaatagagtccgataataataatgttcctctattggttcttatcggtatggaacccaatcgggtgttcatttctttactgatagcatcttgaaaagtagcagaggcttcagtgaaaatctttttacggcatgaaaggaatccatgccagaccattatcaaacaaaacaaagtcatacacatatataataatatgcatagtcttttaaaaaaaaggattttgtctgtatgtctattctcttcttgcatgttgcaaaaatataaaaaatggacatctatataggcttttctcttcagatatatgtaattcaagtccgaagaaaacctacagaaaacctacaagaaatcaggaaatggcattctatttatctgtttaatagcgaattgtgaaatatgtggcacaaacctattgacatccgaattatatatccctacatttacctcaaaaacaaaagttatgaaaaaaagagtttcagcagtagtaattgttttggtttgtttgggtggagttgcttgtatcaagacattgtcgacatcatctgtcggcttgcctcaattggcatttgataatattgaggctttggcgtccggtgagagtagtgcttataggtgttacgggataggcgatgtcgactgtcatggtgataaagttgataagatgtatagtggctatagtttaaaatgacatgagaatcttcctatacatattattaataggaataagtacattaatctcctgcagtggttcacccgatcccctttaccctcggtatacaacttttcctgatgagaaaatagtagccacgcaggagatttctattgattctgcctttttccgttatccctaccgggtagcggtaaaagacagtatcgctgtcatcatggatttacataatgacagccattacttttacgcttttacttatccggagtggaagccgatcgcaccgttcggaaagcgtggagaggcccccggagaaatgctttcggcagagatgttccagttttctgcattggattcagtctggacattggatgctaaccggatgctgatcacgcgctggtctgtctctccgacgggcaagaccgttttgcgcaaagaggaaataagattagataaaacattagttcgctctttagatttttatcgtacagattcagcctttctgatcacagactacttaggtgattttcgttatcacaaagtcagtcatagtggtaaaccgatcaaaaacataggtaaaattcccaccgaaatcagctatgagcaagatattcatcccgctttagcacaagcttggcgtagctttaccgattacaacccgaaaaacgggatatacgcaatggcgacccaattgggagaagcccttgaaatatacaatctaaaaactcaaactcataacgttatatacggtcctgccggagaacctcaattcattgcaaaaggaggcgaaggattcccgatcggcatcaaagggtttgtggacatacaagtcacagacgattatatttataccgttttcgatgggatgtcctggaaagagcgggacaaattttacgaacgcggcatgtctgctcccaaaggaggccatttcctttacgtgttcgatttggcaggaaacccggttcgaaaatatacgctcgacaaaaatatcttgggcatccatatcaatgaaaaaacaaacatcggaattgcgacctgcgcggaaagcgataatccgatcgtgacattcaaactataacaagaaaatgaaacaactgctctacatattattcctattatttttgttagccgcttgccgggaaaacaagaaagatcaatttgcccgtctggttcaggaatggcagggaaaagagatcgtgtttccgcaggatatggctttcacccgtttcgtcactgagcaggtggaataccggatacccgatgcagaatataaagtgctgatttatgtcgattcaacaggttgcaccagttgcaaattgcaactgccgaaatggaaagaattgatcgcccatgtcgattcggcaacaaacggcagcatcccgttcatcttcgtcttccagtcgaaagacgaccgtgagttgcggtacatcctgaaacgcgacaacttcgaccgtccggtctgcatcgatcgggacagccgattggacaagttgaacaaatttccacaagatatcactttccaaacattcctgcttgatcaggacaacaaggtgaaagtgatcggcaatccggtgcataacttggctgtcagggatttgtatctaaaacagattgctggtgtgcaacacaaagagatattggcaaaaaccaccctcgaaccggaaaagagcgaatacgatttagggacagtcaaagaaggaacaaccaagaagcagacgatcgcagtccggaataccggaataactgtctttaagttgacaggtttcaccacctcttgcgactgcaccgaagcgacttgcaattggaaagagttgcaaccgggagagagcggaacgatcacggtcagctatgaagcggaacagccgggagatttttaccgaacagtagacatttatggaaacatcccgaacaactcactgatgttgagttttatcggaacagtaaaataattaacgggaaaaagaaaggagttcctgcctacaggcttgcaaaccgagcagaaactcccggactttccctcattcaataactaataaagaaggaggtaacggcaaaagtagtaaatttggagtaaacaacaaaagggtaggaaatcacccgttccgggaaatgatactgggcgaaagagccacaattaataataaaatgataaatccctaaaaataataataaaatgggaacgaaaattttgggcgttatcgcttttgttgcgatcgctgcagcagcaggctggaactaccagcaaaatacaaatgaggttcaactttctgacttggcattggaaaatgccgaggctcttgccagaggtgagagcggtacagattattgtgatgactttacgacaatgagatgtatgactagcggaactgtttggatggatatgtatcatatctggtaatcaaataataaagagtgtgccagaataaaataaactataggcgaaagtatagaatatgtgaattttgacacactcttttgctaaaaaaattacattatgaaaaatgttattatttcatcaatatatatattgttgacatttttaagtttatcatgcagtaaaaataatttacaaattatatctctaatagaagaaacaccaatcaatgcaatagactatccaaatgaatctataatgagtttcccttggtctatagatgttgttaatgataagattttaacgttttttacccgtggtgaatactttattaaggtctatgatgctaataatggtatggaacttcatcatacaggacatttcggaggtggtcctaaagaatttactcagccagaatattggggtagaaatgagtataatgatatatttatttatgatttaggcttaaaaagtcttagaaaatattcttggaatgaaatttctaatacatcagatttacctgaagtgaataatatcccgttaaaaaataaagatattttagtgctttctggtaaatatatgaatgataactgttttatagcttcatcaatggccggattaacgcagcctatcatagaacttgataaagatttagaaataaaagcaaacataggaaatgttccagatgaacatcatcgtagtacagatttgtcatcatatagtggatctacaagcgtatatgataataaatttgtatttgtaatggcatcattaggatatatagcttgttatgaaaaattagtagatggagcaatccaattattgtgggatttctatttggaagaacctaaatatgtgaaaaaacaattagatagaaaaaatttaaagcttggtttttcagatgtaaagatgacaaaaaactatattttttgcagttattttgggcaaaaatatgtacgagaaaatagaagaaatataaaagtgcataatattttagtatttgatcataatggacattttttagcaaacttgcacacagacagaagtgcaagtagattgtctgtatcagatgatgaaaaaactatatatgcagtaactgaagagccagaaatagctattgtacggtttgatattagtaacatactgaaataacaagtttatgaaaacatggattcttctcttttgcctgtttcttgggtcttgtagcaaccgacaaacgcaatcttccgatcatgagaatttttatcggatagattttcgtcctttggtcaaaaatgaagcacaagaaataggtttaaatgaatgggcgacaaatcctcgatacgtgcaactggaaaccaacgacttcattcgggtcaaatccatccaaaggatcatactggacgatgaaaaactgttagtggttcattcggacagattatctctatttgataaagatggaaaatatatgtatgaaatcggtaaaaaaggagatggagaaggagaatataaaaggatgaatggcgttattttacggaatgacacactgtttgttgtggatggaaattatgattttacacgatacaattggcaaggagaatatttaggtaaattattttgcccacgaatacggcacaccctgaattttttccttattcccaatacgggcatgtttttagggcatgtagacaatcacacaggaaaaaaagaagtcaggtttgttttttttcgagatacgacagcaattaagattgttccgaatctggataaatatgagcctgcttcgtcagaagtcgtatatagtgcaccacccgaaatgaaagcgtttgacgggcttgtccccgctttcaaagaagttttcaacgacacgatctatcaggttgatgaacacttgaatttagttccttatgctgtagtcgagttaggaaaatacaaggctaccaaagaagccatgtttgcttgcacggctgaacagctgatgaaaaaatgggacttcttcaacggcaaaattgcgcttgctgcaaccggagagaaagacggtatcatttatctggcacaccatgatgtaactgatccgtacacttacagctatgacaaaaatgccaaacaagcattttatcaaaaggtcatctatccggacaattcttaccgattcaaggaaggaagtacttttgtgcctcatttcatatcgacagacggaaaatatctgatcgattacgagataccggaaaatggaaattcccctgtgattgtccttgtcgaacgttaataaacaatttataccgtccatgaaaacatgtttcttattcatgatattaagtattttgacctcttgttccatgcaaaaaacaaaaggtgtcagtctggaacaagccttatccatgagcggagaaaatcaggcggaattggaaaaggtgctcgaatattacaaaaatgacagtataaagttagaagcagcccgatacttaatccggaatatgccgttccatttttcacggatggaatatttcgtatcgcccgaaggcgaacgatatgtacccgacatccggaatttcacggacaaccaagccgtaaaaaggcattgcgactctttacaagaaaagggatatacgatcaggaaagagatcgtttacgacatcaaggccttacatagtgattatctgatccgaaatatagacttggcttttcaagcttggcaaaaaccttgggctaaagatatttcgtttgagggattttgccgttacatacttccctaccgggcagaagtggaaccggcatccgatatgagacaggaattaatggaatattacctgccattgatagattccgggaaagcccgaaatgctttcgaagcctgtatgatcataaacaaacagtttataaacgatttaaaatataaagagaccggacagccgttttatccgactgtggaagagacttttcgggccggtatcggagaatgcgacgctttatgcaatttcgcgacaatggccatgcgtgctgtcggcataccggtagtcgtgcaaaccacaacctggacgaaaatggacttagcccatagttggtgtgccgtactacaggatggcgaattttatgatttcagtcctgcttatgccggaccagacgaatacaggcaaaaacttatgactgtccgttatctgaaacctgcaaaagtgtaccgcaacttgtttgatgccgatttcaaaaaatcacggacggacgatggttataccacatacttaaaaagccctttattaaaagatgtcacggcagaaagcggttatccggttttggatttgaggatcgaggctgacaaagagccatcctcagcagaaagccttgtttatttatgtgcttataattactacgaatggaaaccggtcgctattggcatacagaccgatgctgtctgtgaatttaaagatgttgtcggcaataatatattcatcatagctgaaggtggcaaagaacaggagttgagatacattaccgcaccgtttttagtcgattcgtcgggacacatccggaaattcatacctgacaaaaataaacttgtcacgcaagaactttggatagaaaaaggaaaaactcctcgtaacctacatttttgggatgtcgagaaagaatatttcatccctgtatcatgcgacagcattacttcggacacaacgcaactttatacccgtataccggataacgcccttttatggtatgcaacttctcaccgggcattgggacaacgagtaggatttatagaaaacggctaactgaaaaggacatgggatttctaaagaaaatcatcaattggttactgaatgcgattttggttgtttctattgtagtcagcatctggattttctcccaagtcttcctcctcgcctccttccgcatccccagcgactcgatggagccggaactggtcgaaggggatttcgtggcggtctggaaaccgacgctcggcgcacggctgttcgacctcaacgcgacgctgcggctggaacagaccgagatacaccgcacaccgggatttcggaaaacaaagcggggcgacgtgctggtcttcaacttcccgcatcccaacggctgggacaagatcgagatgcatatcctgaaatactacatcaaacggtgtatcggattgccgggcgacacgctttccatccggaacggaaggttccggataaacggcacgaacgaaccgctcggaaacatggattcgcaggaacgcatcgggcggacgttgccgggagagtttccggacggtgtctataaggcattcccgttcgactccgtcatcagttggaacatccggaatttcggaccgctctatgtcccgaaagccggtgacaaggtcgaaatgaaccgggaaaattatctgttataccgcaagctgatcgcatgggaacaaaaagcggaaatcaactataatgattcaaccgttttcctgaacggcgaaccgatacgggaataccgcttcttgaaaaactattatttcatggcgggtgacaaaggcctgaactcgcaggactcgcgctattggggcttgttgccggaagaatatatcgtcggcaaggcggcatttgtctggaaatcggtcgatccgtacaccgggcagttccgctgggatcggttcatgaagaaaatcgaataaaaatggataagcatggaaataaaatacaccggcatggaactcaaattgcataggcatggaatccagactacactggcatccgttttcggggcgatgctgatcgccacgccgctcgtcggcgacagcgcattggcgaacggcattgtgacgggaaaagtcttctggttccacctgtcgatggcgctgatggcgatcgggacggttgtgacggcatggcttggcgggaggaaaagcatcccgtttgcattgccggacggattgttgctcctctttgccgggatcacgctcgcgacatacgactggcagctcgatcccgaacccgaaaaactgcttttcggcgggcagttggtcgtgttgtggtttctgttgcgctattttcttacagaggctccttgcctgaagttctttttcttatttgtgctgatgctcaccggactggtcgaagccgtctggggaatgcagcaattgcatggctatgcctattccaaccattcgcttttccggctgacgggttctttctttaatccggggccttactgcgggtacttagcggtcgtgctgccggtttgcctgtggacggcgttgcggtttcaaaaggggatgcattatttcggttgggtatgcgccggagctatcctgattgtcctgcctgccggaatgagtcggtcggcgtggatggcggcggtcgtggcttgcggatgggtgtactggacggaacggatcggatgggagaagacgaaagctgtatgtcgaaggtataagaatgctacaattccttttattgcaattgtggcgatattggtgggatgtaccattgccggggtttacgggatgaaacaagattcggcggacgggcgattgctgatgtggaaagtgacggggaaagcgattgccggacagccgcttgcaggaacggggttaggcggattcccggcggcatacgcggaggcgcaaggcgggtatttcgcaacagggaacgtaacagaccgggagaaacgggtggcgggatgtcccgaatatgcgttcaacgaatacctgcagatcggactggaacagggagtcggagggttgatcgtgttcgtggcgtggctggggaacatggcgtactatggaatccggaacaggcagcagggagcggccggtggcgtgttggcgttagcggtgttcgcggtgtcgtcctatccgttgcagttgccgtcgttttgggtggcgttggtgtttttgggggcgatatgcgtgacggaagatgggacgcggacaagatcatctgccctatccgtatcaccggtgtgccatattacgatgataagtctgttgtcgcttgcctccgtctgtctgttcatcttgcagaaagggcaatatgaggcatataaacgatggggacggatgcagatgatctacaacaacaaggcgtatgaatcggttgcggaagattatcacgagctgcatgacaagttgaagcataaaccggaattcttgttcgaagaggcgcaatgcctcagcaagacgggacaacacgccgaagcgatacgggtgctggaacgggcgaagcggctgagcggagacccgatgatccggtacatgatcgccaaaaaccggcagacgctcggagattaccgggaggcggaagaagaattgcttcaggctatcgggatactgccggagagattgtatccatattatttgttagccaagctatatgcagagccggagttctaccaggcggataaattgcgggctgccgccagtgtcgtgctggccaaaaagccgaaggtggaaagtacggcaatccgggaaatgagggaagaagtaaaaaagataatagacaagggcgactttgattgaatattctatttgtgattaaaagagactctgtatagataaagtttttcttgcaactctttgtttattaaaaaaaagcctctatctttgcagcccaaattggtatgagaataagataataataaataatatacagaaagatgaaaagaacatttcaaccttccaaccggaaaagaaagaacaagcacggcttccgttcaagaatggctacagctaatggccgcagagtattagcttctcgtcgtgctaaaggaagagctaaattaacagtttctgacgaatacaacggataattctttccgtttgaagatttttcataaagaaagtagaggtttttactaaaaagcctttactttctttgttttaacggctttgttttctacttttgatccgccgacaaatacaagatagaaatgaaagactttttggttaaactgataaaaaatccgtacgtcttaaatctgttgctggctgtggtcgtggcatgtgctctggtgttcggaacattgaagtggctcgactcgtacacccggcataatgaggctgtggtagtgccggatgttaaaggattgggaatggaagaggccgccgaatttttcaagaatagtaatctacgctataacgtgatcgattccgtcttttcaaaagacgtgaagcccggtgcgattgtcgagctggtcccgatggccggttcgaaggtgaaggaaggacgtatcgtgttcgtcaccgtgaatgcgctcacttcgcagatggcgacaatcccggaagtggaagacctttcgttccggcaggcttacgccattcttcgtgcccgcgggtttgaaaagatcgagatcgaatatgtccccggtgattttaaagacttagctcttggtgtcgagctgcacgggcgtgttttgcagaaaggcgagcatgtaccgcttaccgctccgttggtgttgaaggtcagtagtggggatgctgagatgccggccgactcgctcggactaccggatgacagcgtgccggtcgaatcgttggatagtgaagaagaaaactggttttaactatggatgagtttttagacgaaatggatgatgaacaggtagacgacctgttacaaccggaagagggtgaagataaggctcctcaactgtatgaacacttccgcttcgtggccgatcgcgggcagtcgttgttgcgtgtggataaattcctggtagaccggatgttcggtgctacgcgtaacaggatacagtcggctgccgatgccggttgtatcatggcaaacggcaaaccggtgaaaagcaattaccgggtgaaaccggaggatgttgtgacaattatgatgacacgacctccgcggactttcgagattctccctgaaaatatccctataaagatcgtgtacgaagatgacgatctgctggtggtcgacaaaccggcagggttggtcgtacatcccggacacggaaactataccggaacgctggtgaatgcccttgcctggtatttgaaagacgatcctacctacgatcccaatgatcctgccctgggactcgtccatcgtatcgataaagatacatccggcctgctggttgtcgccaaaaagccggaagcgaaagcacacctcagtatgcaattcttccataagacaaccaagcgggaatatcgggccttggtgtgggggatcgtgcgtgaagacgaaggacggatagaaggcaatataggccgtaacccgcgtgaccgtatgcagatgacggttttcccagaaggcgaccagggaaagacggcggtcacacactattccgttttggaacgtctgggctacgtcacgctggtgaaatgccgcctcgaaaccggacgtacgcatcagatacgtgtccacatgaaatatatcgggcatacgctattcaacgacgaacgttatggcggaaacgagatcctgaaaggaacaacctcttctaaatataaacagtttgtcgataactgtttcgccatttgcccgcggcaggcactccatgccaagacgctgggtttcgttcatccgactacaggcgaggaaatgttttttgattccgaaatacctgccgacatgactgcgttgatcgataaatggcgcgtatatgcaaatactaaagaattatagatgatgaaaaggaacattgctattgtagccggaggcgattcctccgaaatcgttatttcattaaaaagtgcggaaggaatcttctcttttcttgataaagacaaatataatgtatatattgccatcgtaaaaagagacgaatgggcggtaaaacttcccggcggggaacacacaccaatagacaagaatgattttagtttccgtgagaacggcgagatcagacattttgatttcgcctatattacgatccatggaactccgggagaagacggacgtctgcaaggatatttcgatatgatcggaatgccgtattcttcttgtggtatgtttgtaagcgcacttacgttcaacaagtttgcctgcaatcattatctgaagggattcggtgtcgatattgcccgttctatacatttgtttaaaggacagactgtgacagacgaagaagtggtcagtcgtttggggcttccggtctttgtgaagccgaacgacggcggcagtagtttcggagtgacgaaagtgaaagaagcctcggctatccagccggcgattgacaaggctttcagtgaaggccgggaagtggtcatcgaaagttttatcgacgggaccgaggttacatgcggttgctataagacatccgataaggaggtggtgttcccgctcaccgaagtcgtaacggataacgagttcttcgattttgacgccaagtataacggacaggtacaggaaataacgccggcccgtatttctgcagaacaaacagaaaaagtacaacgcgagacatcgaggatttacgacatattgggggcgaaaggtctgatccgtgtggattatatcattccggcggacggtgaaccaaaattgctcgaagtcaatacgactcccggtatgacggcaaccagttttatcccacagcaggtacgggctgccggtctggagatgaaagatgtgatgacagatattatagaaaacgagtttaactaattgacaatgaacaattgccaattgccaattatatgagaaacgaattgtcgattgtcagttgtccattgtcaattgtcaattataaaaatatggaagttcctattaatgattttgacgatatccgtccgctgaataacgacgaggtgaaagacgcgatcgaatcgctgatagccaacgaagattttgagcgggcctttcggtatataaatccggatgtgaattggaaagagttttcagaaaccatgcgttccttcaagacaaaggaggatttcaaagcgaagttggcatatgaagcggtaatgatggtggcaaataaaaccactttctcactgacgatttccggtcgtagccgtttgccgaaggacaaaaagccttgtacctttatttctaatcaccgcgatattgtattggatgcctcttttttgaacgtcatgctgtatgatgtagggtatggaatgacacaggttgctattggtaataacttgttgatccgtccgtggatcgaaacgctggttcgtttgaacaatagcttcatcgtgaaacgcaatgtcccggtgcgccagatgttggaagtgagcaaagtcctttccgcttatatccgtcgtacgatcacggagacgaaagaatccatctggatcgcgcaacgtgaaggtcgtgccaaggattcggatgaccgtacccagggcagtatcttgaagatgctgaacatgagtggtgacaaggatatcctgtcaaacctgatggaattgaatatttttccggttgcaatctcgtacgagttcgatccgtgcgatttcctcaaagcaaaggagtttcagcagaaacgcgatgatccggactttgtgaagagccagcgtgacgacctgttgagcatggaaaccggtatcctgaataacaagggacgtgttcatttcaccttgacgtcgccgattaacgatcagttggcgcaattggatccgaatatggaaaagaacgagttgatcgccgctatcgcctccattatcgataaggagatttacaagcactatcgtttttatccctgcaactatgttgcctatgatatgctgacaggcacacgccgtttcagcgaacattatggactgaaagataaaaagcagtttgaagattatctgcaaggtcagttggataagatcgtattaccgaacaaggatgaagcttttttgcgtacgaaaatcttggaaatgtatacgaatccattgaagaatttttttgctaatcaggaataaggtcaaacgtgtttcatcacgatctttcaggcccggatttcacatcgtgtgatccgggcctgaattatttctgttagtaagttggattttgtttaggcacacctttttctatttgttctctttcgcgtaattcgacgggctcataccgaattgcttgataaaggcggaccagaaataagactgggagctgaagcctgtagcttccgaaatctcatagatcttcatattcccctgtatcaacagctcagcggcctttttcagacggcttatcttgatcaactcgttaggagtcaggtcggagatggcacggattttccggtacaaggtcgggcggctcaggtgcatcaggtctgcgatcatatttacatctaaggctggattgccgatatgctcgttgatgatctcgttcagcttttccagaaaactttcgtccgctttggtataggccatcgatttcatattcgctatcggagagttgaaatagaatttgcgtatattgtcgcggttggagatcagattggaaatctgcgccatcagcaggttggtggagaagggtttgtccaggtaagcgtcggctcctaattccagaccttccaggcgtgactgtatggtgtttttggctgtcagcaggatgaccgggatatggctgaattcgatctccgtctttacctctttcaaaagggcgaagccatccatgacaggcatcatcacgtcgctgatgatcagttgaatactgcgtttctttaataacgtgattgcttcggctccgtttccggctatctctacattatataactggttgacttcatcggcgatgaaaacggccatttctttgttgtcttcgacgatcaggatcgtcgggcgcgattcgtcgtggacgaattctattttttgaggtacggcttgcgttatagcctcttcttctgtctgcttgatggattcgggcagcttgacgggcaaggtcaggcggaacatcgtcatggatgggctgtcggcaaaagtctccaactgcaagctaccgtggtgcatctctgccagtgaacgtgccaagggcaatccaagccctgtccccggtttatccgtagcgcctccttccacccggaagaaaggttcgaatatcttttcctttaattctgcagggataggagtgccatcgttgataaagtctatcgtgaatgtctcataatcgggagaaagttgcaggcgtataatgatgctgccggatgcgtatttgattgcgttcgtaaacaggttgctgaatatctttgtgatcgcttctttatccacgaacacgtacaattccggcaaagacaaatcgaggttcagcaacaggttgtgtgccgttgccgattcttggaaccgcttggctgtatcgtttaggagcgagacgatctccgttcggacgaaactgaggcggtatccttctatctccgttttgcggaagtccaacaattgattgaccaatgacaggaggcgggatacatttttatccatcaacgtgagcgacttattctctttttccccgatcttgtcggatttcaggagacgttcgagcgggttcttgatcagggtgagcggtgtacggatctcatgagcgatattgatgaagaaatcgatcttggcctgatacagctccttctctttctgatcttcgaacaactgcatgttgtaggccattgcccgtttggttttccggcgccaagaccagaagaagccgacgatgatggcgagaatgatgacaatataagaagcatatgccggagtcgatgcccaccaagggggcaaaacggtgatattcagttgtgtcggagtgtcgctccagttgttcgacaggttggcggcccgtacttcgaaagtgtaatcacccggatgcaattctgcgaaatagaccgtgttgcgctctccgatcggaatccattccttgtccatatttcccatcctgtatgcatactggatggatttaggggcgatgaagttgagtgcggagaagttgatgctgaatgtggattgcttgtaggtcagcgtgatcttcttagcctctgattcggcggaagagttgatgatgcgtttctctccggcttcattctggatttcgaggcttcccaagtggacgttcatcttctcggctgccgggattacttcggatggcttgaaatggataaagcctttgaccgaaccgaaatagaaagtcccttcgttgtctttgaaggcggagttatcgttgaattggcgagtgatgagtccgtgggattccgtgtaggtcgtgatcttaccggttcctgtttctaggctgaccagtccgttggccgtactgatccataaggtttcgttttcgtcaggtaggatgcggaaagcaacattgctcggcataccgtttttgacggtgtaatgtagggattcgccggtttggaagtcgtatttgataaccccttctacggtagcaaaccacatattgccatctttgtcctcgcaggcgtcgttaacgaaattgtggcgctgggtgttcaatttgtcgtacggcagatacatgccggtattgctgatcggattataatagaaactgcggttgaacatgccggtccagattcttcctaagcgatcttcgtaaatgcagtttactgcgaaaggaggaaattgcggggcatacaggaaacggtcgttcaggaagtcatatttatagataccgtcatcggtcccgacatagacttgtccctcctgcaatactttgatgcagcggacggtgctgttctttaccgtcagcgagtctttcagcaggttgtaatgcttgatgacctttctcgtcttgatatccatcaagtcgatgccgtggataacgtgcccgatccagagccggtcgcctgatgcagccaagcctcggatattggtgtgcgacaagccgtttcctcccggaaccggctggtagttggtgaatgtcccggttttcttttccaagcagttgatgcccgcatcttccgtcccgacccatatattaccgtatatatcggtacagatatcgcggatcacttctcctttcatcgaatactgcccgtcccagggataatgcacatggaaagggcggaaaggggaatagtagttgaggccgttttggtggaaacaaatccagatgccgttctccctgtctcggcagaatgcagagatgaaatggctcgataaggcgtatgggtccaacgggtcctgacggatacgggtacactcgccggtgttgaccttatagataaacaagccggagtctgttccgatccacaattcgtccttgtctttttcgaggaagctgttgatcaggatcgtaagctggttgatcttttgaatgttcagatcctggtagtcgcgtgtggccggatcgaatatcttcacgtcgtcatgctcgaaagcgatgtaaatacgatcggtcgtaggagagggatataacatggaaagtttctgtggcgtgttcggggatgagtgggcgaatacattataggactccattgtctcgtcttccggattcagcaatgaaatcaacccgtccgaactcccgatccagatactgttttcgcgggtaatgcaaaaagaggtgtagctttggttgtcttccggagcgaagatacggaactggctgtcctccgtattgaaccggatcaggttaccgtccatcagtatccatagtttattgtctttgtcgaactggaagatgtcgatccctttgtctgctgtgaaaggaatgtgccggaacgattccttttcatcgtcatactgatataatcccgaaagcgtccctacccacaagtcgccgttcatgtcgcaccccaggcatgtgatccagttgcttcccaatgtctcggtttcgtcggggtcgttacggaatactttgaacgtatatccgtcgaagcggttcagaccgtcgcgtgtcccgatccagatatatcctttcctgtcctgcacgcaacaagtggccatattgtcgctgagtccgttttcgacctgataatggcggaaaagatagttactgtcgtctgcatatgtccgggtgagacaaaatatgaataggatggataagattaacttcagatgtttcatacatgactttgctattatgggcgaaagatactgaaaaatgtattatggatttccttttattgtgtcacggatttcataaatcatctcaataaaggtgataacggcagagaatgagatgaatacggaaaagattgcaacaaggtcaaacaaaccgaccgtggaggaatcgatacatttgtaccatgtgaaacacaggtaataaaaaccttttattctaataatatgaatactcttactacaaaacaaggaatcggaacgaaggttcaactctgcacaatgatgtttatgcagtatatgctgagtgcagtctggtgggtccctttagccgcttatctttcccatacgcttaaattggaagtgtatcaagtctcgttggtattaagtgcgatggctatcggtgcgatggcatcctcttttatcggcgcgatagccgaccgttattttgccgcagagaagatcttggctgtattgaatatactgacaggtgcctttttgcttctggctgcccagcagacatcatttgttcctcttatggcatgtgtcgtgctggccatgctttgccatatgccgacacagagcctgaccagtacgatcgccatgagccatacgccttcggaacagtttccgcgtatccgtatgttcggttcggtaggatgggtagcttccggtatcttcagcgtgatcgcccttcatgtgatgcatttatccgctttcgatgatacgaacctgccgatgtattgcggcgccgctgtctgtttcgtggctgcgcttctgaacttgcgattgccgcacactccgccttcggtcgataagagtgccggcatctcggtgatggatataacgggcttcagcgctttctccctgatgaaggataagaattaccgggtttttatgattctgacgttcttggctatcatcccgttcaacttgtaccatgtatatggttcgatgattctcgccgacgagcatgtgcagaatataacggtgacgctgaacctcgggcagttggccgaaatgtttttcctggtcatcaccacttctatactgataaagtcggggattaagaataccttgatcttcggtatgatcgctctcgtggtccggtatgcttcgttctatatcggtgcggagaccggtctgcaatggttctattatatcgggattatcgtacacgggttgatcttcggcctcttctttgtcggtggccaggtctatacggacaatgtggctccaaaagaaatgaaagcacaggcacagggtttgctcttcttcctggtgtggggcatcggcttcctgatcgggacgctttggaatggctggctgatcggccttttccgtgacggggataaatgtgattggcctgtcgtctttgccatctcgaccctgttctcgttcgtcttgttgatcctttttgtctttttattcaaaccggtagcattaaagactaataaatagtaaagagtagtaaagtaataattttatcaaatccttttaattctcaagatcaaatatattatcacacgccagatgtaatgcgggctgtccaacaactttggatggcccgcttttattgatgggaattagctccgggcacttatttttcctttttcatagttgctgtttttttatttgttacgtgatctacaaatatgtatattgtattattaattaatcaacaaatacacaggtattaacagcattactatcactcctttccttttcgcccttagtcgaaaaggtttttgacctgtgtcgaaagggcttttgaccaagggcgaaaaggttttcgactaaaggcaaaaggtctatgagcaggctgtttgacaacagtagcatggcgattgtcatttaaatagaaccttccggggcccgactttatccctgatggaggcagacgtaagcggtgaaactccttttactactggcattcatctgttcgatgccgacagaaaggaatgacactggcgtatgtttcttaacatactcttttgggtgacataatgttagccttatttcttatctttgggacaaggacgtaagaaacgcttacagtctgctaattttaaatctgaataaagatgagaccggaagattacatcacccgtgaggggaagtttggtgcgcacaactatcatcccctgcctgtcgttctccagaagggagaaggtgtttatgtttgggacgtggaaggaaaacgatattttgatttcctgtccggctattccgccctgagccaagggcattgtcatccgaagatcattaaggcacttaccgaccaggcacagcagttgacactagtgtcgcgtgctttccatgccgatattttaggagagtacatggagtttgcctgcaagttcttcgggtatgacaaactgttgccgatgaataccggagccgaggcggtcgaaacggctctgaagctggcgcggcgctggggataccgggtgaaggggataacccctgaacatgcgaaggtcgtcgtctgcagcgagaactttcacggacggacgatcacgatcatttctatgagtaccgatcccagttcgtatgcggacttcgggccttatacgcctggttttatcaaagtgcaatataataatgtggccgaattggaagaggcattgaacgatccggacgtagtcggtttcttgctggaacctatacaaggggaggctggcgtggtcgtccccgacgaggggtatttgcgtaagtgttatgacctctgccggcaacataacgttctctttatcgccgatgagatccagacgggtatcggacgcaccggtaaactgcttgcctgtgattatgagaatgtccatcctgacatactgattttaggtaaggctttatccggaggtgtcactcctgtctcggcggtctttgccgacgatgagatcatgttgacgatcgctccgggtgaacatggttccacctatggcggtaacccgttggctgcccgtgtagcgatagctgcccttgaggtggtgcgtgacgagcatctttcggagaatgctttcgaaatgggtatccttttccgcagtgaaatggagaagatcgacaatccgatgatccgccaggtgcgtggaaaaggacttttgaatgctgttgtcactgagccgcgaggtggaaaagcggcctgggatatctgtttggcactgaaagaaaaaggattgatcgccaagccaacgcacgaccatatcatccgtttcactcctccgttggtcattgaccgggatcagatgatggaggctattggcattattaaagatacgttcgctcaattttgattgcctatgaagataaatgtgataggagtacctctcaatttagggtgtgaccgcgaaggtgtggagcgcgctccgaaccatctgcgtgaacgaggcctgatgaggattatccgtaaaaacggacatcgggccttcgatctgggtaatctgtatgtccctttggtttcggaggcggataagtttgccagagggcggagcttgaaatatctggatgcgattgtcgaagtcaataataacctggcagagctggtctacgacacgttgcgcggaggggctttccctttggtgataggcggagatcattcgttagggttgggcagtgcgtcaggggtgggaaagagctttgatgatttcggtatcatctggttggatgcgcatggcgacatcaatacgagcgagacttctcccagcggcaatattcatgggatgccgcttagcgccttgatggggatggggagcgaagaattagtcaatatctatgcgcccggcaataaggtgaacccgcagaatgtcttcctggtcgggacccggagcctggatgaaggggagcaggctttgatcgagcgtgagcagttaagcgtttatacgatggacatgatccacctgaagggtatcggttttgttgccgaagatatcaaacggaagctaaaggaacggaagatacggaatgtccatttcagcatagacgtggacagtatcgatccccgctttgcacccggtacagggacacgcgtgtgcgaagggttgatgccggacgagttcaaggatttcgtcgaacatatactattcaccaatctgatcaagtcgatggatctggtcgagctgaatcccgaactggatgtgaacgatcagacaaccaatctatgcttggatataatcgattatataacagcccgtttgtaagcggattctattgttgagaatgggacttggggttcctcgtagaagaaactgtcttgaaactccaagagccgttcctgaagcggtaagcatatccgaaaccgtttctttagaacggataaccgattgccagatggacgcccatgccgtctttgaagtccggaatattgtaatagcctttctttcccgtatcgtacggtacgtgcaagccgattccccaatccaggcggataacgaggaaggtcaggtcgtagcgtagtccgataccggttcctaaagccaggtctttcaggaaacggccccatttcaactgtccgccggggcggcttttgtcgtagcgtagcagccaaacgttgccggcatcgaggaaagtcgctccgtgcagatcgcccaaaatcgggaaacggtattccagattggcttcgaacttgatgtcaccggtctgatccaaatagccgtattttgagtcggtcgggcgataactgcccggtccgatgcttcggatcgtgaaagcccggatactgttggcaccgcctatataaaattgttcgctgtaaggtgtcgtgatcgaattgccgtagctatatgcgactccggccatcaggcgtccgaccaggtgttgcttctttccgagataatagttgtatcgtatttcgctcgtcagtttggcaaactgggcgaagcggttccctaacagtttcttatcccgtttgttaaagctcttaccggcgatggcataggcaccgtcgagaataaggcccgcctgtgtgatggaagactgccaccagagatggttctttttggtagtgatgggagaatcgtcatacgtgtatgtatagcccatcgacgggatgaactggttctcgaggcttcgccccaacgccttgttgacatctacgatggagtcgaattcatgcgtcgtatgctgcaacagcgagtaggtcagcttgaacggcgtcaccgaatggtggctggtcgccgatggctggaactcgtacgaggcgcttccgccgaatgccagcatcttgaagaatttggcacggttcaactgatccgcatagatacggaaagaggtactggaagggtatttcgtatcatgctttatcaagctggggaaaagtacccgcgggaaagtcagcgtaccgctgataccgaactcccagctgttgatcgccgagctgttgcccgaaacccgtttgccggtctgccattcgtaagaaccgcgcatactgacgccgaatgtctcccctcctccgaatatattccgtttggtaacgctgaaaatggcgcctggtcctgtctggtcattgctcttggtagtcacgttcagttccagttctccatccagaggaaggtcgtaaacggtgttgatctgtaagttcaacgtatcgcaacggcgggcggtatctttggggatatattgcatttccgaataacggaaaatgccgagacgggagaagccggtctgggtcttttcctgctgttgctgcgaatagagatcgccggggcggaatttcagccggtcgtacagcaccttcggacggacacgcaacttcccttcgtaaaagatggtcatatctttataccggatggaatctgtcggtggctcgttgttgtagccgttcaggaataccgatatgttgcctatcttccaggggcgcagtacggtgcgtggcagccctggctttgtggagatacggagcgctacctttccgggattcatgatcgtatcggcctggtagctgataaattcgggacggaaatagtaatacccgttgttacggagcagggaagagatgcgttggcgttcggcttcgagttgtacgacattgaaattatctccgtcgcgcagaagccggtcgccgatgttgcgctggacgagtgtgtcgatgcgatgccgtagccggacgtaagcaatgctgtcgtatgtgtaggcattgttcatctccaccttgtagctgatctttgcctttttggggttcttggggtccggttccacctcgtaggaagtcgctccgttgaagtatccatattcgcgaagcaggttataggctacctttgtccggacttccggattgaccgtgttgatgaagacgggtttggatgccagtttattgaatatccatttacccacttttccctttctgttcacgaatgcattgtacatccatagtccgaacggcaaagggatacggatagacgaactccctagcagggcgttattgggcggataggcaagagcggcctctatttccgtcagcgcctcttccccttccttgcttttgtcctcattcgtcacttcaatcttcttgattcccgtatataaaacttccccctccggcaaattcttcgttgtagagcaggaagcaagcaggaataacgaaatatatgcaatatatttgatgtgtttcattttttctcttctgtttgtttgtcgtccgttaccggtttgggcttgttttttttaaagatgaagagttcacggaggtgaagcatctttttgcgcaggacgataccggcaccggtttctgtgatctcgccttccagcagactctcgtagttcttgtcgtggaagagcttgatgtagcgggttccgctgccgtcgagacggtattcgatcgaaacgttgtcgatgaactgctgcgactgtccggcgttgacatcctgtccggtcgaaacacgtccgcccagtatgatactgatccggtcgttgtagaaccgcttggcgaagcggaaggagaagtctgtccgctccccgcccgatcctgtgccgttctggtcgtactgctccatgcccaaagtgatatccacagacttcaaggcgctacccgcgatattgttgatctcgctttgcaggaagctgttcagggcggctcccatatcgaggctcggtttctttccgccgccgccgacatcgctcatgttgaggtacatccctgtgacaagcatcgtaacggcgatctgcgagcgttgtccttcgcccatcttgtccagttcctgttgcatggattggtcttccggtgcggagaggataaattgcagttgcaggttctccaatgtctgtttgatcgccacaccgacattgaaggtgaccagacgtgagctgccgtcgtcttgtgtgacggatgcccgcatccgttcggttgctgtcaggttcagcatcgggtccatcgggttgccgctccactggacgtaactaccgtcctgtatcgtgaactccttgagcggaataatcggcatggcatattttaccatgcctcccgaaagtgtataacgtccgttcaggatcatttcaccctgtgtcgtatattggaatgacaagtcgccccctccctccagttccacacggctcgattggtcgggggtgatatctgcgttcagacggacggcctggtcgatccggatcgtcatcaacatgtccagtccgccgatgggcagaggtgcttccggccggtgccggcgggtcagcagcgtatcggagaaatcggtaaaagtcacaaggtctgctaagcggtcttgagccgtgagcggggattcctgcatcacgtaagtgacatttgtcccgcccaacagttgtaaatctcctcgcatgatcaaggcatcgagcggccccttgacagtcgagttgaggttgacaagcagcttgccgtacaccatgctttccttattgcgtttcacattcagcagttgcatgtcgtgggctgtcagtttcaagtttgccgtcattcgggaaagattgtgaatgtcgatcgttccgtcgactacgaacggattgatccccgatgcatagatgttgtatttgtcgaaactgatcagattattcttgatcttgatatcctgcttgtcgaaacggaaggaagaaccgactgccgtgacatataccgccgagctgtccatccgcacatacccgttgacggcaggggccgaggtggttccggttatcgccagttccccttgcaaggctcccgtcagtttggccatcttgtccggaatgaacgggtttaccatctccaatggcaaggcggtgatgttcatatttccgtccagataatccgtttttcccattttgtaataggcattgatcgccgcaacctcgttacggtcgcggaaaaggtgcatgtcgacctgatgctccttgtcgctaagtggcaggtaaacagtgttgaacatcagttcacctacccgtcccccttcatagaacaggctgtcgatatgagcgtccgccacaaccatgaagctgctgtccgaaggggcatactgcaagtcggcgctaagcattcctcgcatggaagggaggtccgggaatcccttcgtgatcgcatctaggtctatctggcttagctcggcatggatttcttccattccttcttctccggcaagcgagtgaatccagagcgaagcattgttttcaccggtcagccggacatcggcggcaatatcctttatgttgcggtacaggatataattatcggtattcaatttaaatgtacggaaagccagtatcgggtcttccgggaaaagatgcaggcgcaatccctctttttccttgtcgacacgagcccctaaccggataccggttttaccttggccgtcggtatattccagtttggcatcgacaaaagtgttgcggagctttcccagcaagctggcggtgaaaggttgttgtttcctgtattttgtcttgatgactttcgtgtcgtacaacaagccgagcgaatcctgccggacaatgaggcagatcgtgtcgatccgtgttgtgtcctgcatcaggttgaagagatcggcatcgaggaagaaaccctcttccggtgaagtgttggcttcgatattcaggttgtcgaaggtaatataatattgttgcaggatgttgtagatcggattatccttaccggctgtgattttcaggtccatatccgggaggagcggacggaaagatggaatgtcgatcatcgaatcgcgttctagctgttgggtgagaccttcgtttattttcgtgaacttatcggtcatcgtctcgatatccgcatttccggtcaggacgattccaaagtctccggcgtggaaagagacgcgggtagtgtctttatcgctgtgagcgtgtaaagtcaatgttttcgggtggaacttaccggtcggatttatcagttcccagttaccgagggtaacgtccacttggttattctttcccatgtctgtttccgcctctgcgaaaagctggaaggaggtcgccagcgaatcattcataaagtgcatgccgtacaggtccaggttttgcacgtcggcgattagcatcgcattcactttcttcttgtggagggttgcattgagcgacatatccatcttcgcaagcggataatggctgagcaggtcgaatttcaacaagttcttttccagcgaaccgtctaaccttacgtcggatacggcgtatgtcccatactcgatattcgtaatcttcccctctaatttagcccaagtggaaacgtcgaacggatcataccctttcccctcagcacggaacgaggcggccaggtggtaaagggaatctttgggtaagaattcggttggtttcaggctgtcaatcttcaggtcagccaagtaagacgcttgtacggggttataacgtgcagtcagtccgaccttgccttcgccttgcgtgagcaaaaggtcggcgcggtactcttggttttgcaaagtcgcttcccctttcagtttcattaccggaaggttatagcgtgaccgttcggattccggtagcatgctgagaacaaagtcaagattcccggtttgggcatccagctgaaacttacccgaacggcggatactgtctgccacggctctcatttctcctgtgatattcagattgaagatgccaggcagttcgcctttcagctggcgcagccgtaaagcagccaggttcccttctattccggctgtcaggctgatttctttttggggataggcttgtttgaactccttggggagaggaccggcaaagataaatacatcttcttttcctaccgaggctgtcagcaggctatggagcgtaccgctcggtgtattgtcgaacgtattccagggaacggttgccagcaggcggatctctgagtaaggtgttttcaacagaagccccggaacctgtatcgtcgtgctgtcactgctgatgtctccggtcagtgaactgagcgtcaaacccgagcggtcattagcagaaaattttttgatccgtgcactgatgtccctgcctccgtataaaagcgaatcgatccggatattcacatcgttcaaggctatatgtgccggatcgaaacccggcgccgggtcactatagctaccgtcgtagctcagggaagagccggacagcagaaactgggatgcactgtagcgtgccgatccgaggtcgactatcccgtcggttaatccagccttgtcgatataggtcgaaagacgcagcgagtcgcccggcatctgcatggcaaacgctacccgatccaggtcgatttgatccagcatcaatttccagttgaccgccgtcgatgtcgtatccttgtttgttgtcgtgtcgttcatcaggagagtgatggctgtgtccgaaaggtcgattttgttcagccgggcgatctcttttccgaggtctatacggtctgctttagcatagagctttcctaaagtacctttgatctccattccctcgatcaggttgccagtattggctttcacgccgcgcaggtcgatcgcatccaccaagacttcttttttcagcagtggcagcggacggatgttgacttggaaactttcgagtgacaataacgtgtcgggaggagttatgactttcacgtcccggatcgtcagattcagcgggaaggaaagacgtatctgcccgatcccgatattcataccggttgtttcactggcatattcggtggctagccgcacagcgaaattctggagggggggtatatataaaagaattgaaatcaagatgaccaataccaccggtatcaggcatatgatccctattcgcttcatccaacgtctcatttgttcttattgtgtgttttcgttataatcataacggttaaaggacctgttttgtttgacattccattaacaaaaatagggaataaattaaaaataaagaagtaatatcgataaaacggtaataataactgcttggagccgttatattaaggctgaacataaaaagattaaacgatgattggaatatcggacctggaatacctttgtgcggaagtacggcaaatagcccgtaaagccggtgcatttctgcgtgatgaacggcaaaagttcgatcgggagcgggtggaggaaaagagtgcacacaattatgtctcgtatgtggataaagaatccgaacggcgtctggtcgaacaactttcgacattgcttcccgaagcagggtttattgccgaagagggttcgggaagcctgacggacgaggagtattgttgggtgatcgatccgctcgacggaacctccaactatatccatgatatggctccttacagtgtcagtattgccttgcgggatagggaagaactgttgttgggtgttgtatatgaggtctgtcgcaatgaatgtttttatgcttggaaaggaagtaaggcttatctggacggtaaagaaatacgggtaacggatgtagctgttttggataaggcttttgttgcgcttggtttcccctatgattccgaccactatcgtccggtcgcccaaaagctggtggaccgtttgtatggttatgccggggggacgaggctgttgggatctgctgcggccgagctctgttacatcgcctgtgggcgattcgatgctcggatagaaggacatctcggcccgtgggatgttgcggcaggcggcttgatcctgatgcaggcgggtggcaggctgtcagactttgccggtggcgacacttggccttctgccgagcaggtgatggcgagtaacggggtgatacatgataagatcctccgcttgttgtagtattgtttttatcaatgccgttatttccttttccagtcctttttgagggctttctttcggattaggatgattgggataaatatgatagctatccaaaagaggctgatctacataagagttagagatgaaaggttctccggcatcaatgctttgtcggcctgtttatcgggtattgcttcggaatgtatcttttgggcggatagatgaaaaaagtcctacctatttttaggtatgaatgtaaagggcagaatgatttatttgtcggaaagaatcgtgatgaggagcgatatccctgctaacaagcccccgaaactaatcaattctggtgaaagaggttgtgccgaaacagtcttgttcccgcacaacctttttatttaaatagatacaggcagattaggaatggatcaatcgttttctatcacacggatcatgtcgaagtagaattcgccggctacttctgctcccttttctacaactcccgtctttgtatcgtagatgtagatgatggcattagtgtcggcttcagtgttcacaccgaaataagctttctcgttgaagacgacagaacgctgtgagaaacggccgccactgtaagcgagttcttttccttcatagctcaaacgtgtcctttcgcctgtagtaagatcgatgatagaataataatggctgtaactgtcaattgctgtaccagcagcatcgttgcgtgcataagctagagctttgccgtttcccaaatactggatggtgagcaatttaccgtctgcattcggatatccttcgtaagtggcgtcgaaatcgatttcaccattgttgatacgcaacaggtgtccttgttccaaatcgcccttttcggtgattgcggcgaggtagaggttaccgctttcatcatacattacgcagtcttgcatcaattcgccgtaggcacttcccgccatttctcgggcaagcgagttgcgcttgttgctttctaccgccagagtgacaggatcgagcactgctgtataaaaagcagtagtggttttgccgctctttcctgaaagaccgttcttcccgtaatagaaatagaacagttttcccgttttttcattataggtaaggatgcccgatgtggtgaatttctttgtttcttctcctgtaacctctgattccggtagtaggatgtccagtgtgccttctgccagaatcgacatattatcggtgttcagcttactccagatgaccttgcttgcatcgccgttggcagccatgacaacaagcgtgttgtcatctatccaggcatgggtgtaggagcgtactttgtatgtatttgtcttaaagggagatgatgcacattctattactttgttatctttgatctgatattttacgaaacggtcgttgcttgaagggatctgatagtaatatttccctttcgagatgctttccatcgagtagtctcccaattcggttccttcacctttaacagtgatagtccccatatcggctgtcagtttattgacgctgttgacaaccgtcgtgttcttgctgctcatgccgccatgttttcctacggtcagaaacaggtcgaaatgatacttgctttcgtcgaaggcaggtgcatcgttggttacagtcacttcacaagtggcagtgaatccaccgtcgtccgtttttaccttgattgtagtcgaaccttcggaaattgctgttacaataccattttctattgtagcgatattcgtgtccgaactgctccaagcgacagttgtaacagctgcattttcaggaacgacagtcgcagtcagtgttcctgtagttcctgtttttagtgttaatgtggtaggagtgatcgtgacaccggtcacagacacgtttttcaaatcatcgtcatcagaacaagccgtgaaactaagtgagatcagggctgtcatgaaggtgagtaatgcaaatttgaacttcttcatttttttcttgtttttaaatatgaatgttaattgataaatactctgaattttgcaaagaatgcgcgtccgggtttttgcagtttatagttgtcataagctgtttcgtcgaggaaattagaacattccagtgagatgttgtagctgtcgtgtttccatgaataggtgatattggcattgcagatatgctgtgagggtatacgggctttggtatcgcggttgccataggcttcccatgtcaggaaataccaatgtacccactggaatgtacagcctaaacgtagcttgttgtcatgtagtaggaggttgtggaacgtataactcgcctccgcgttgccgaatagccagggacggttgggtacgtggttgtcgtatgtggcggatggtttgccgtcttctttgtatttttgttggtcacgggcgtcttgatagctgacgttggccatgagttgtaatcgaccgtcccaatcataacgaatttccccttctacgcctttgatatggacggctggatcattgacaaactgcatcataccctctttttcaatgacggaggtttgaatataattgtccacataacgtaggaatccgtttgcctcgtaatagatagtatgtctgccggcaggatgccatgtgccgaacaaggcgagattgacgttgttgcttttttctggtttcagcgctacatttgcataaatggtggttccgttgcctaacaattcacgggcgatgggcaagcgtacgctgtgttcataagaaacctttaccgctaatgggtcgaagaacatatagcgcagtccggtaccatatccaaagtaatttttggtagtagaaccttgcactttgtccgatcccgtcacggtggactggtcggtctgccggatattcgggtgattcacataatctttggcaaagaatacattctgcattttcccatcaaaaaacgactggctgtaggtcagtccgatgatatgtttggtaactgcatcgtttgatggttcgaaactttggtccaaatcatcatagcgatcatttccggtccggttcatatgataattcaggttaagaccgtgatgtccgtccagttggtaatccaaattgacacgcacgatagtcagagggcgtttgtaatgacgtatagaaggttcattacctctgatttcgttgcgttgactcacgatatagcctccatcccaataatatttccgataagctgtatcgatagtaatggaatgatcccatgtatgtgacaaagttgctttcaatgtcatgccttcggtcatgaaattatatttgttataacgaaccgatacgttccatgcatccgaattacgttccgccataccataaactttggtttgtatggatccggtctgcagttccttgtctgttttggagtaggaagcggaaacgaaaagttcgtcagcccaaaacttacctgtgattccagcttctatctgtgccaatagcgaaaaatagccgtcatggaaacgttttgggttgccgtagatgaattgatcacctgtctcattgcgcatctgcacgtctttcatccggtagtcgtttttcgaatagctgataccgatggcaggacgcacgaccaatccggtgtgccgttccataaactgtgcgttcaggttggcacgatgtgtatggaaggaaccgatgctataagaagcgtccatgaaacttttcttttctgcctgggtgataatgttgacagctccgcctaatgcatccgtccccaatgaggctggtactacgcctttatagatttccactcggtcaatcaggttgacgggcagattggcgagcgtcacatagctccctttgctatccaagggaacaccgtctatgaaatagcggacggaattacctgacagaccgttgatcgagaggtcgaaatcggaacctacgcctccctcttcgcgtattttgacaccgcttgtacgattcactaattcattcaggctattaagtgaattaatgacaggcttaacgtcaagagcattaaccgaaagtgcgctttctcttacctgttgtgattgtgttttcccatacacctccactggacttatgcttacggaactttcttccagtttgaagtcgagggttttgttgtgatgaaggtcgagtgaggttttgatcgtttggtatcctaaggaggatacgacgaatgtgtgtttgccaggggatacttgtagggaataaagcccactgtcatccgtataagtgccggagaccgtgttttcgacggcgatcgttaccaacgacaggggcgtaccttgctgatcggtgactttcccggagagcgtaattttgttttgtgccgtcagacttagttgcaacaggcagacaagcaaaaggaatacatgtacaaagactttcattttaatccttgatatagtgttcatgacttgcttaagggaatacacacaaggagaaatgatatctttatgtaaggggataaagaatgacttgactcgatgttttgtagctttatttcccgaaagctttaaaactatgtttgttttggcaggtcttctgacttgttccgtctttgaatgccttcccatccggtgacggacagtggcttgtagcgtattcaaagatttggagaggaacttacagcagcgggtctgttcaggattcgcacctgattcccttttcatcacgcctcccgtagcggttgggagccgtgaaaccaaaactgtggcaaaggtatgaaaaaagtctgtctgtacaaaaaacggattaaaaaacaaattcattatttttggcgccggattcgttagactccgtgaaagaataacagaatgtggaacgattaaaaatgaagtgactatgttggaaaaaggattgaaacatatcagccggactgtcgtgcagccggataatttcgcattgacgataggatcgggagatttgcctgtattggcaacgccggctttggtagcattgatggaaaatgcggcaatgttggccgtagcggctgaactccccgaaggggcgactactgtcggtgctaaaatggacatgatacatgttcgtccttccggtgaaggtgaggaagtgcatgcggaagcgacgctggttgaggtggaagggcgaaagttgaccttctcgttggttgccagggattcggcagatgtgatcggcgaaggcacgcatatccgctatattgtcgacagagcgaaatttttgttgaaactgaaaggctaaccatcacttcgattgctgcgagaaaaggaatatgaagttacctatttgtaggtatttacagtctgctgaatagttatttatggtgattttatatttcttttccaccttctatctttgcctcaatttaaaataatcagatataatcataattgctaatttgcatagacaacgaaactaaaatcgaagaaggcttctcgtgagagaggccttttttatttgaatgtattctaccgataactcgatcctgaaaatgactatatgtaggtagtatggaggtctgttttacctgtaaatagggattggatattatcgttaaatttgcgaactttgtcacctaaatggctgttatgtctatagttctcgataaatggaaggattaaggaaatatttaaggattgcgctcccattacttttcatatcgtatttgggatgcctgatagcttttacccacgttcatatagtgaacggggtgacgatcgtccactcccatccctatcagaaaaatgacgacgggactcccaagaaagaacataactacgccgagtttcagttgctgcaccaactttcgactattcaaatcagcggtgctgcttttgcacaagtgctgattgctgcgtttcttgcaacattttgtgttttatccacctgtccggtttatccggatcaccttcgtcctgtcctggggaaggtttcgcttcgtgcgccaccatttgtcttttttaataattaatgacggtacaaaaatctacttgtccctgcatcttgcggcgagaccgtaaaagaacatgccttatcaaccagatgtttttatggccggcttttatgtgatctcgcgtctaacgtgggaacaaggcggttctgtatacctaccacttcctatattattaatttttaaaagacatctcaatgaacaaaatttatatacttttcctatgcctttgctatgccgtttcggcaataatggcaaacacctataaaaatgataaagaagtgacgagccctacggatgccaatatttttgggcatgtcgtggataaggcgaccggtgaacatttgccgggaataacgatcatcctgaaaggaacgacgatcggttccgtgaccgatgactccgggcattatatgttaaaaaatctccccgaaggagagtttacgatcgaagtctcttttgtcggcttcaagacagttacgaaaaaagtaacgaccggaaaagggaagacgcaggaactgaattttgagcttgaagaagatttgatatcgctcgaaggagtggtcgtctctgccaaccgcaacgagacgaaacgccgtctggcgcctaccctggtgaaggtactcagcccgaccgtgttcgaaaagaccaactccacgactttagcacaagggctggttttccaaccgggcgtccgggtcgaaaacgattgccagaactgtggttactcgcaagtccgcatcaacggtatggaaggaaaatatacacagatattgattgattcccgtcctatcttctccgcattggctggcgtgtacggattggaacaaattccggccaatatgatcgaacgggtcgaagtgatacggggcggaggatctgctttgttcggttcgtcggctatcgccggaacaatcaatatcataacgaaagagcccattcgcaattccggttcctttggacatacgatttctaatctggacggatctggagcgtatgataacaatacgaccctcaacctctcgtgggtatcgtctgacaataagatgggagcttatatctatgggcaaaaccgctatcgttcggcctgggattcgaatggagacggcttttccgagcttccaaagctgaaaaatcagacgattggtttcaacggcttctataagaccagtgcctactccaaattgaatattgaataccatcatatggaagaatatcgtagaggcggtagtggaatgaaacttccgccgcatatcgccgaagaccccgagctcaacggaacaggtgaggccgggcttgtcgaacagttacaacattcgattaatacgggaagcctaaagtttaatctttttactccgaaccagaaacataacctcagcttctatgcgtccggacagcatatccaccgtgacagttattacagcgcatatggccggacgacggatttcacaggagtgatgggagcgcagtatatctacagttttgacaaatgcctcttcatgcctgccgatctgacgggaggtatcgagttcagtcacgacgatctggacgatcgtgccaccgacaagcagaagtaccgggaagcggccctggcggaagatccgacggctaccggacagcatttgcaggaactgatcgaaaaatatacgccggcatccttgcatcagatcataaacgtatggagcgcctatgcacagaacgagtggaaaaatgataaatggagcttccttatcggtgggcgtgtcgataaaaacagcattatggataaggctgttttcagtccacgtgccaatgtgcgctataatccgacagccgacgtcaatctccggttgagctatgccgaaggtttccgtgccccgcaggcctttgacgaagatttgcatatcagtaatgtcggaggtgcgcgcgtctcgatcgtgcgggatccgaatctgaaggaagagcgttcgcggagcgtgaacgggtctgtcgactggtatcattattttggagatttccaggtgaatatgttactggaaggattctatacgaaattgagtgacccgtttgtcttgtcagcccctgtagaatcggaaaatggttcgctggtgcagactcgcagcaacggttcgggggcaaaggtgtacggttctacgctggagggaaagattgtctggaggaataaagtacagatacaggcaggtataacggtacaacggagtttatatgacgaaccagaggaatggagcgcagataaggaacatttgacggatgcggagcggtatagcgataaaattttgcgtactccgaatctgtacggttatttcactgcatcctatacaccggtaaaaccgtttacaatagcgtttaacggtaattataccgggcgaatgtatgtacctcatctgatgtctgaagtgaatgggacggcggatgttttggtgaagagtccggatttctttgaattgggagtcaagttgagctatgatttcaggttgacggcagccatgaccttgcaacttaacctgggtatccagaacctgttcgattcctatcagaatgacttcgacaaaggggcaacccgtgactccggctacatttacggtccgggaactccccgcacctactatgcgggggcaaagttcagtttttgattttcctttatggacgcctgttcgttatttcatttccttcttatttaaactttcgattcaggcgtccatacgcgggttctttatgttgttgtagattgtaaaagaatagacgaaattttgggagaactatgtcaagataaaagaaaaattgatcgttaacagtgtttaacgaataagatggggtcatttggggcgttcttttgtcttttggtaaaacaaactcaaagtggaagaactgcgacatagaaaaaatatagaccaattgttacatgacaaatcttttattctttggtgtctgtttcctacagaggaatcggataaacaatggaaggagaattatttgtcactttatcctgaagaagcggagactttgatgttggctagagagaaggtttgccgacttaaattcaaccacgtacaacttgcctttgcggaaaagactgcattgaaaaaaagaattctggataattacgagaaacaccgtaagcctaaatatattaggttaagttggctgtctgcggctgcttgcttgttgatattctgttttttgggatctttatacttgcagtatcaagaagtgtcgaatgtggaattgagcacttcggtcttagctgatgtcaaagtggatccggaacaaaaagaagttgaacttcatttgtcaaaggaaaaaatccaggttacggataattctacaatttcagtcgataaaaagggtaatgtacaagttgctgaaatagaaataaaatcaattgatcgaaagcaacattctgagcaggaaaaagaagacgaacatctgaacatgttgagtgtcccaaatgggcgacgatcttcattgatcttgtctgatgggacaaaagtatggattaattcaggaacggtattgcagtttcctgaaacattcgagaaagagaaaagagtgctctatgtgaacggggaaatctatattgaagtagccaaacatccccaatggcctttttatgttaaaacgaatcaaatggaagtacaggttttaggtacttctttcgggattactgcgtatgatgacgaaattttccagactgtcgtattaaaagaaggaagcgtctttgttaagaataaccagggaaatggacagacaattcaacctaaccaatgtctgatggttgaaaaagaagaaatgaccgtcaaggacgttgatgtttatgattatatctcatggatagatggtgtacttcaatttcatgagaaaagtttacaaaaggtgttgaacagcttatcacgctattatcgtgtccgttttgactgccctatggagattgggcagataaagtgctcgggtaatttggtcttgtttgatgacattgaccaagtcttgcagacacttcaacggactctctctatttcttttagccatcgggatgaagtaataaaaatagaatatgttcataaataataaaaagcctatgagaaaacatacaaagtgaagtttaattgaaaccaagtatttggtaatatgaatcatgtgattttttttaataatttatgctatcatgaaatatcaaaaattaaaaagaaatttgtacacagcatgcgtagtcgcaaatttatttttgattcctagccctgtactttgggctgaacaatcatatgcgcagtctacgcgtttgtcattggaattatccaacgcaacgatcagtgatgtttttgcatctgttgagaaaaatagtgaatatcgtttcttttattctgatgcagttcgtgcggaattataccggaatgtcgatgtgaatattaagaataaaaccattgaccgaatcttatcggaagttttggatggtacgaatctgacgtatttccttaacgacaggcaggtgatgattatcaggaaagaggaaaaaacgcagcaagagaaaaaaatatcaatcaacggaactgtcagggatgcccaacaggaacctttgcccggagtcaacgtattggtcaaaggtacgactatcggtacgacgacggatatcgatggaaattattttatcagcgttcccgataagaatgcagtgctagtcttcagttatatcggctttgaatcgcaagaagtgaaggttggtggacaaatcaatatcaatgtcaatatgtcagaagagtctaatagccttgatgaagtggtggttgtcggctatggctctcagaaaagagcttctgtagtcggttctatcacagcgatagagcctgctcagttacaacaagggactacccgtgccgtgtctaacaatctggcaggacaattggctggtgtgattgccgtacaacgtaatggtgaaccgggatctgatggttcggatttttggattcgcggtatctcttcttttaaggggactggtgtttcgccattggtgttggtcgatgggattgagcgtacgctggatgacttgtcggctgccgaaatcgaatcgttttccgtactaaaggatgcagcggctagtgctgtatatggcgtacgaggtgcaaacggtgtcatccttgtgaaaacgaagagaggtcaattggggaaaccgaaagtcaatttccatttggaacaaggttttaccaagccgacacagttgcctgattatatcggttcggtagattatctttccttgatggatgaattgtatatggatgccggtaatccgaatccgctttatggagaggaaatgatcaacaactaccgtaataatgtagatccggagttatatccgaatgtcaattggttggatgccgtatcgaaagacatggcttccaatacgcgtggagatttgactattaccggtggtagcgatatccttcgttatgcgttggtcgcatcgtattatggtgaacgaggcatctttgttcgggatgaaagtaaggattgggattcgtctacacgcttgaacaaatataatattcgttcgaatgtggatatcaatgtgacgaagacgactgttgtgggcattagtatcggtggttacctgcaagaacagaacggtatggctgtcagtggacaggatgtctggaatcatgcatttgaaacgcctccattcgttcatccgatccaatattcagagggacgtgatgtacgtgtccgggaacgaactaatccatgggcagaagcaacacaacatggttatcagacaacatccagttccaaagttgaatcattgttctcggttgaacaagatctgaaatttattactcccggtttgaaattcaaaggtctgttttcttttgaccgctattcgaagtcgtgggtgaaacggcatcgcacaccaacctactacaatccggctacgggccgtgatgaggagggtaacttactgctgagtgtcggaacggacggacaggagttcctcgatacggaaaacaaaggcgaatggggtaataaggctacttacttggaaggaaatatcacgtacgatcgtacgtttgatgggaaacatgccgtcaacgccatgtttctttataaccaacgcgactatcaggacggcaatgtcgtccctttccgccgcatgggtatcgccggacgtgcttcctatacgtatgacaatcgctacattgccgaatttaactttggatataacggctccgaaaacttcacgaaagggaaccgctttggtttcttcccctctgtggctgtcggctatatgctctcagaggaaaaattcatggagaaatacaaagatactttttctaagatcaaattccgtgcttcttgggggttgaccggtaatgaccagttggatggccgtcgttttgcctttttgccgaccattgatacggatggcagttataaatggggagtcaacaacgattataaccgtgcttcccgttttgaaggagaatttggggtgatgaatctgacttgggaaacggttgagaaactgaatgtcggaaccgaaataggtttatggaatgccttggatttgcaagtggactggtttaaagagcagcgtcgggacatctttatgcagcgtaacaacattccgtcggcagccggattccgtaaaacgccgtgggcaaactatggtaaggtggataatatcggtgtggatttgtcgctgacttacaaccaacagattacaaaagatttgcatatcggttttagaggtacgtttacatatgctcacaatacgattgtcgaaatggatgaagcgctcggtgttatgggaacgaaccgccagcggacgggacattctgtgaacgaactgttcgggttagtggcagacgggctctttacggaagatgattttgttactaatgataaaggggatctggtgttgaaagaaggtattccgtcgcatacgtttaacagtgtgcgtcctggtgatattaaatatgtggatattgacggtgacggatcgatcacaaataaggatgaggttgccatgggaggaacggtcaatccggaaattgtttatggtttcggggcgacagctcgttacaagcaggtcgatttcaatgtctttttccaaggaaacggtaagactcatcgtttcatcggtggtgtggcttcgaacttcttgcccggatcttcacaaggtgcaatgggcaatgtcttgactaactacaatgaccgctggactccggaaaatccgagcgaagatgttttctatccgcgcctaagctatggggcgaatacgaacaacagccagaattcgacttggtggctgcgtaatatgagcatgctgcgtatgaaggatatagaagtcggatatacgttgcccaaacgttggatgagtcggatcggattggaaaatatccgcctgtatgctaaagggtcaaatttattgacattctcggcttttgatctctgggacccggaacttgatacgcagaacggtgcgaaatacccgattatgaaatctgtctcattcggtattgatgttaatttctaatttgagtttaagtttataaaaatagaatcatgaaactgtttaaatacataacgatagctttttcaagtctttttatgtgtggttgttcggactatttggataatgctccggatgatacgttgacaatggaaatggtcttcaatgatagaactcgtacagaggattggttatcaggtgtatataatcgtattccagataattattgggatttgttgaaagtttgggggtatgactcgatgggggatgatttggatccgtcgcagcgttggtatcaatggtgggggaattcactgaacttcatcatcggacagtggtttactagttcgacctgggatgctgccatttggagtgcgaacccgattcgtattcgttcggcttatcttttcattgaaaatgctcacgcgttgccggatcagggggtgagtgaggctaacatcgaacggatgaaggatgaatgtcgttttttgattgcctattattattggcaaatgattgaagcttatggaagtgttccttttttcgatggactggcagatgtgaatgatccgaatttgatgcgtggacaaatgcctttcgatgaaatggtagattggattgatgcacagttggttgacctttccaagaaacttccggcttcttacttgaatgaatctacacaattttatggtcgtgccacttccatcatgtgtttggcggttcgtgcccgtatgttgttgtttgctgcaagtccgttggtaaatgggaacgaatggtatgcaggtttcaaaaattatgatggtaaattccggttcagccaaacttacgatcctgcaaaatggaaacgtgccgcagatgctaaccgggagttgatcgaagcagcacatgctgccggtcatgatttggtacgtgaatataatgccgatggcagtattgatcctttcatgtcttgttataatgtgtttttcctgcgcggcgatcagaatccggaagctctgttcatccgttccgactgtaatttcagtgagtttgaaaaacatgctactccgcgtggagcatccggtaacggcggtttgggtgtctatcagacattggtcgatgccttcgccatgaaggatggttcccttccgattaccggttatgatggcaattatggaaaaccgattatcaacaaggaatccggctatacggaacgcggtttttctgcgcaaaaggatatccgtaaaactaagtacaatctttaccgtaattgtccgggagctacagtcgactcggttggcgcagatggttgtacctataatcaagtggctgcctccggcacttacaatatgtatgtcggtcgtgaacctcgtttctatttgacggtgatgtggaatcgtcagtggtatcatcaggcagaacgtgaagtacaaatgatgtcgaacgaacaagacggcggtcctacgcatgacgctccgcaaaacggttatctgaaccgtaagaaagtctcattggatcaaaaccagcgtaacggtatacatccgtatcgtccgggtatcctttaccgtttgggcgaggcttatctgaattatgccgaggccttgaatgagtgcgatccgggtaatcctgacatcttgaagtatctgaacttgattcgtgaacgtgccggtatgccgcagtatggaaccggaaaggatagtaatggctttgataaaattccattgaacggccaggatgaggtgcgcgaagcgatctatcatgaacgtcgcgtagaactttgctgtgaaaacggcttgcgttatttagacctccgtcgttggaagaaagcggaagaagtgttgaatcaacctatgtacggtatgaatttcagtggaacgaagttgtcggatgacccaaatgatgatgctgcattcttcaagcgcacgcaatatatcaaacgtgtctacgagcgtaaattctattggtatccgatctatcaagatcaaatagataaagacccgacacttgttcaggctccgttctgggacaagtgagaatgtacaaaaagttattcgtaatgctaaagaggggtaaaactgcccctctttattgtttatctcaggaacatcagtagaaacaatagttcaatttttccttgttgcatacgttctatggcacggtagatcatttttcgcacacttttgggagtgatattgagtatttcggaaatttcttgtatggagagtgctttgataaagcgcaaatatatgacttcccgctgcttgtttgtcaataaattcaataggctttcaacctctttctcatagtttcttctttcttcttcatcctccattaaagcttcggcatcaacttctattttgaaattatattcgacttcttcatctaagctaagccagttcgcctgtttacgtaaagatgttattatcttgttcttgagagcactaaacagataggatttcggagagccgagaatttctattttatcagccgattcaaacaagtgcaaaaagagatcatgtattgcatctaatacaaaatctttttccactccgaaggctattccataggcgaacaactcatctatatagttctcataccatttatcaatttctgatttgatatttgacatttcgtattggtacagtgaaattcaaaaccgcaaaaatatagaatctcattcgaataggcaatgaaatatccaaggctacgcaccaaaattgtaattgccttagttgttcaagagggtgaccgtatcacaattttctaaggtcatgatctctacacggagttttcacaaatcctctatcactctatcactacgaaggttatggctattaatattcaagcgttagaggcagtgatacaggacgttttcctctatcactcctctatcacttctgacacatggtgcttttgtcatataattgaaaaccagtgtattgccttcttttgcttttgaaaaagcatatgaaataatcgaataaacaaatgtaaaaacgaatataataggtgttaaattggcgaaatacggttcttcatttcacaaaagccctctctttatttagcagaaacaagcagataattccgtaaacacccccatgttgccatccttaacatccgggtgtagagggtcggtacatccgggtgtaagagggggcaacatggggatgtccggcaacaaaagtgccttgccggacaatcaaaaccacccggttttacctatttttatagccgtttttagagaaaaaggctctgtttttttctttggtatatttcatgcgatttccgggttttggtgcggttgccctggttgttcaaacctgtttgagaggatttccggcttttttcctatctttaccgccaattaagcagtatcaggaaaattacgaaattttccgccatgaatgcatgcttcgcctaaagaattaaatctcttattaatatagtaattaagcaaaaaaatgaaacgtatagtttttttggattatgtacgcgtgttcgcatgtttccttgttatggtcgtccacgccagtgaaaacttttatggtgcccccggttcgacggacatggtgggaccgcaagcctttctggcaaatgagtcagaccggctatgggtgtccatatacgatgggttttcgcgtatggccgtgccgttgtttataatagtctctgcttttcttcttgcgccgatgaaggaagggcagaccatgtggcagttctatcgtcggcgttgtatccgcattctaccaccgtttttcatattcatgatactctacagtactctgccgatgttgtgggggcagattgatggagcgacctcgatcaaggatctgtcgcggatatttctgaacttcccgacgctggccgggcatctatggtttatgtatcccttgatcagcatttacctgtttattcctatcatctcgccctggttgagcagagtgacggtcaaagaagaacgtttctttatcgggttgtttctcttgtcgacctgtatgccatatctgaaccgttggttcggagaagtgtggggacagtgcttttggaacgaataccatatgctgtggtatttctccggttacttaggctatcttgtgctcgcacattatatacatgtccatctgacctggaaccgttccaaacgttttattatcggaattgtttcgatgctcattggtgcagctattaccatatattcgttctatgttcaggccgttcccggagaaatactccccacgcccgtgctggaaatagggtgggctttctgcaccatcaactgtgtgttgcttacggccggcacgttcctgatgttcagttgtattgaacttcccgaaactccgcgcttcgtattggaactctctaaactcagctatgggatgtatctgatgcatatcttttggctcggtctgtgggtggcggtgttcaagtccgtcttgccgttaccgactgttgccgccattcctgtgattgcgacatgcacgttcatttgctgcttcgtgacaaccaaggttatttcgctcattccgggcggcaaatggatcgtcgggtagaatatattcgtttgttactttcgattttcactttgtaaagggtaaaaagatcgttatcccttcatttattctaaaatattctaaaatcagcgacagcaattctgtaatcagtggcagtgattatataattgctgtcgctgattttgtaattgctgccattgattacagaatatttcgtgtgtccgtaccgaattttggcggtcgaaatagagcgtatcagaaaaaaagtttacatttgccaccgaatcggttctgtatttcccgttcgggaatatggattaaaagggaatcgggtgtaaatcccggacagtcccgctgctgtgaagctccgttttaacatcttggaactactttcgccactgacttgttataattaagtcgggaaggcttcaggatgggagtcagtcagaagacctgccgttcattataaggttcatatcctcgtgggttaggctatggatgcgaaacataaatacaataaatatgataagaaaagttctgattgcgaatcggggcgagatagctgtgagggttatgcgctcctgtcgcgaaatggggatacggtcggtggctgttttttcggaagcagaccggacggcacgtcatgtcctttatgccgacgatgcggtcttgataggaccggcagcatcaaaagatagttacctgaatatcgaaaagatcatccgagcagccaagcaacacaaggtggatgcgattcatcccggatatggtttcctgtccgagaatgcggattttgcccgccggtgcaaagaagaaggaatcgtctttatcggcccgtcggcagaaacgatggaggcgatgggagataaaatatccgcccgcaagcggatgatagacgccggcgtgccggtcgttcctggcacgcagcagcctttgcaggatgttggagaagcatgccgggtctgccgggagatcggtttcccggtcatgctgaaagcctcgatgggaggcggtggaaagggaatgcgtctgatccataaggaagaagaggtggaagaggcttacaacgccgctcgctcggagtcgctctcttcttttggtgacgatacagtttatctggaaaagtacgtggagggaccacatcatatcgagttccagattttaggcgacaattacgggaatgtggtccatctctgcgaacgcgaatgctctgtgcaacgccgtaaccagaaaattgtcgaggaaagtccgtcgccgttcattacgccggaactgcggaaagagatgggcgagaaggcggttgcggctgctaaggccgtcgactattccggtgccgggacgatcgagttcctggttgataaacaccgtaatttttattttctcgaaatgaacacccgtttgcaggtggagcatccgattaccgaagaggtgttggggctcgacttggtaaaggagcagcttcgtattgccgacaacgaaccgttgcatatccggcaggaagatatctcccagcgtgggcatgctatcgaatgccggatctgtgccgaagataccgccaacaatttcatgccatctcccggcattatccgccagctgaccgaaccgaacgggatcggagtgcgaatcgacagctatgtctatgaaggttatgagattccggtctattatgacccgatgatcggcaagctgatcgtgtgggctaccagccgcgagtatgcgatcgaacgaatgaggcgtgtcttgcacgaatacaagattaccgggctgaagacgaatatcagctatctcaggcggatcatggatatacctgattttgtgcatggaacctacgatacgtcgtttatcggaaagcatggcgaggagctgcaacatccggtgaaccccggagacgagcatgaatcggaaaatatcgccatgatcgctgcttatatggattacctgatgaacctggaggagaacgcatcgggctcttcggcggacaaccgcccgatcagccgttggcgtgagttcgggttgcagaaaggtgtgttaaggatttgaaaaattgtttataatggaaatacatattggaaaccgggtggctgatgtggagctgcttggaaaggatggaaacaaggtgcggctcgacatagacggacagccctacgaggtggatatcgtgatggctgagaacggggcttgttcgatcttgcatgacggacattcttacaatgccgagctgatccgttcgggaggaggaaagaactatcaggtcaacacgcttttctcctcttattcggtcgacataatcgattcgcaggccaaatatctacgtatgcgcaagaacagcgaagaaaagcagggcgacaaggttgtatcgccgatgcccggaaaggtcatgaagattcctgtgaacgaaggagaccttctgtctgccggggatatcgtggtggtgctcgaagccatgaagatgcagagcaactataaggtcagctctgattgtcgggtacgtgaaatcctggtgaaggaaggagacacggtaaacgtgaatcaggtgttgatgacattggaagtaattaatcaggaagaaaatgcagaaagaagagatatataagaagtttgaagaactagataaagtggctgctctgggtggcggcgtagttcgtatcgataagcaacatgaggcggggcgtatgacagcccgtgaacgtattgatatgttgctggataaaggtacgtttgttgaactggataagttcgtgacgcatcgatgcacgaatttcggcatggagaaaaacaagattccgggagacggtgtcgtttctggatatggtaagatcgaaggtcgtcaggtctttgtctacgcctacgattttacagcttacggaggaacgctcagttcgaccaatgccgccaagatcgtaaaggtccagacgctagctctgaaaaatggtgcacctgtgatcgcattgaacgattcgggaggtgcgcgtatccaggaaggagtcggtagcctggcaggttatgcgtcgatcttctatcaaaatacgatggcctccggggtggttccccagatttcggctatcctcggtccttgtgccggtggagcttgttactcgccggcactgaccgatttcatttttatggtgaaagagaagagccatatgttcataaccggaccggatgtcgtgaaggccgttacgcatgagacggtggagaaagaggaattgggaggcgcctatgtgcatagcagtaaaagtggcgtgacgcatttcgtgtgtgatacggaggaggaaacgttgatgagtatccgcgagctgctgagcttcctgccgtcaaacaatatggaggatgcgccgtctctcccgtgttctgacgatatccgtcgtgaaacggaaacgttacagacggtgattcccgatgatccgaacgtgccgtatgatatgaaggacgtgatcgagccggtggtcgacaatcattattttttcgaagtgatgtctcattttgcaaagaatgtggtggtcggctttgcccgtctgggtggccagtcggttggtattgtggcgaatcagccggctttcctagctggtgtgctggatatcgatgcctcggacaaggcggctcgtttcatccgcttttgcgattgcttcaatatcccgctggtgacgtttgaggacgtacccggctttttacccggctgtcagcaggagcatgacgggattatccgccacggagcgaagatcgtttacgcttatgccgaggcgacagttcccaaaattacgttgattacgcgtaaagcttacggcggcgcttatatcgtgatgtcgagcaaaccgatcggcgccgacatcaacttggcttacccgatggcggaaatcgcagtgatgggagccgaaggggctgtcaatatcctgtaccggaaagcggaaggagaagaaaaagcacaggctatgaaggcatacaatgaacagttctcaaatccttatcgagcagccgaattaggatttatcgatgagatcatcatgccccgtcagacacgttataagttgatacaggcgcttgaaatggcaaaaaataagagccagagcaatccgccaaagaaacatggcaatatgcctttgtaaatcaaggacgtcgatttgaaaattataaataactaacatggtgaacaaaagaatcattcgacagaatcaatagaattgattagaggaaggcttgcttgtgaaagtcagccttcttacttttgtgcccgcatttaatagagaaaagacaaaaaggatggaaaaagagactttgacagaccgggaggttttgttgttacggagaaaactggacttattactccgtacgggaaaattgctgatggagagtgccgcggatacgaaccgcatcgaacggaacatgaagcgtgtggctgcttttatggggattcctgaagaaaagcttcatctggatatcagatggacgatgattatggtgaatgtgagcgacgagacacattccttttcaaaatttcagaagtgtgagaagcatggtatcaatatgacgaccattacggaggtcagccatctgtcatggaaggcgattgaacaagactattcgttggaccagtatgaggaagagcttgagcggattgcgcgtaaacctcgtaactatatgccttacctggtggcaatcggtgcagggtttgcctgtggcggtttctgtaagttgttcggctgtgactggatcgcgtttttgttcgcttctatttgtgcatttgtcggattccgtgtccgagcgcgttgtatcgagttcgggataaatgtgtatatgagtattgcgattgcggcgtttgtggcgacttgtctggcgtatgcttcttctttttcggggctgtcatccacgccttaccatccgttgctggcttgtgctctgtttatcgtgccgggagtaccgttaatcaattttgtggatgacatgattgacaatcatttgcttgtcgggattacgcgggcggccaatacgatgatgatggtcggagcgatgacgttcgggattgcttttgccatgcgggtgttggtaatgaacgatatagagatcgaccataagttcagtgaattgagcatggtgccgcatgatccttattatatttatgccattgcggcggctattgcagcgatgggtttttcaatgattttcaatatccagcgacgtttgttgtgggttgtggctttaggggggatcattgcagtgtgtacccgtaattttgtgaattttgagttgggatatggtccggtgatcggttcgtttatgggaagttttgtcgtgagtctgattgcggtaaaggcggttcattggttcgatgtccccaatcatgtgttaacgatcccgtctgttatcccaatgattccgggagtgctgatgtatcgttcgttgtttgcttttatcaacctgcacggggtgattggtgaagtgaccaatgcttttgccaacgggatcaattcggctttaattatcttgtgtatctctttaggtgttgccgttccgaatatcttcgctcgccgctacattgccaaagaccgccagcattatcttgaagaagaacttgaaaaacgcaggcagcgtggtaagttcattgaatggtaaggagattcatgaattatgagttgtaaaaaattcataaatcataattcagttccaacaagacagtcttgttggcttttagggaagctttgacatcgatcaggcgttggttgctgctgccacggaaaagaaggctttcatcgcgtagggcttgtttgaatttaccatctaccaagacgtcgatgtatttgagtagttctgcctgtttcggattgtccaaaagacgctcgaaagtatagccggtataacaccagatgtttttccggcttttttctttgatcgcctgtgccagcttggtgaaaccttccggttggaacatggggtcgccgccgctgaaggtcacgttggcaaagtcgtctgccaagaccttcgttagaatctcttccgtcgatatttgtttcccctttttaatgtcccacgattcgggattatgacagccaggacaagcgttcggacaacctgccgcatagatcgcggtccggaatcccggaccgtcgacagttgtatcttctatgatatcaatgatggaaagcactttggaaattgaaaattaagaattgaaaaatgaaatgcttgacttctgagcttcaattcttggtttataatataactgtttatatctctcgcaatcttcaatttttaattatggacgaccctgtcgtttagttctgccagtttcgctttgttccagcgatctgtcgtaccgaccaggtaaccggtgatgcgctgtagtttgtcgagatgggtgctgccgcatttagggcatttttccaaatgcgtttccgcattttcgtagccgcagtcgagacagcggttacgattgtggttgacggaaccgtagccaatgttataacggtccatcatatcgacaacttgcatgatcacttccgggttatgggtcgcgtctccatccatttcgacatagaagatatgacctcctcgtgtcatctcatgatagggagcttccacttccgctttgtgacgagcgctgcatttgtagtagacgggtacatgattggagtttgtataatagtcgcggtccgtaataccggacaacgaaccgaattgcttacggtcacgacgggtaaacttaccagacaagccttcggctggtgttgccagtacgctgtaattatgctggtattcttctgaaaactgattggccctgttacggatatagctgacgatcttcaggcctaactcctgtgaagccgcattttcgccgtggtgtttgccggtgagggcgaccaggcattctgccagaccgataaaaccgatccccaatgtaccctgattgataacgggtgcgatcgtgtcgttcggtttcaatttctcgctacccagccaaagagatgacatcagcaacgggaactgtttggcatatgccgttttttggaattccatgcgctcgtgtagttggcgggcggttatatccagcatgtggtcgagcttggcaaagaattgggcgatccgttcttccttgttttcaatgtgcatgcattcgatagcgaggcgtacgatattgattgtcgagaaagagaggttaccgcggccgatagatgttttcggaccgaagcggttctcgaatacacgcgtgcggcatcccatggtcgcaacttcgtgcatataacgttgcggatcatcggcacgccagtcttcgctctggttgaatgtcgcgtcgaggttgaggaagttcgggaagaaacggcgagctgtaaccttgcaggcaagctggtaaaggtcgtagttacggtcttccggcagatagcttaccccgcgtttctttttccatatctgaatcgggaagatggccgtttcgccattgccgactccgcgatatgtgcttttcaatatctcgcgaatgatacagcgtccttcagcagaagtgtccgttccgtaattgatggaactgaatactacttggttgcctccacgagaatggatggtgttcatattgtggataaaggcttccatcgattgatgcacgcggctgacagttttattgacggcatgttggatgatacgttcgtcgccactcaatccttcgagcggacgattcacatagtcatccagtttctgctggtagagatgtgaataattctgtccgttcagttcttccaggttcttgatttcttcgataaaactattgcgcacgtaaggagccagatagaaatcgaatgccgggatcgcctgaccaccatgcatttcgttctgggctgtttcgagcgagatacagcctaaaatactggctgtttcgatacgctttgccgggcgtgattcgccatgtccggctgaaaaaccgtatttcaggatgtggtccaacggatgttgtacgcatgtgaggctcttggtcggataatagtctttatcatggatatgcagatagttgttttctaccgcctccttgacctcttcgctcaacaagtaatcgtcaacgaacggcttggtcgtttcgctggagaacttcatcatcatgccggcgggcgtgtcggcattcatattggcattctcgcgggtgatgtcgttggatttgatattgatgatctccaggaacatatcgcgtgtcttggctttgcgggcgatactgcgctggttgcggtaagctatgtatttttgtgcaacgtctttgcggctactgttcatcagttccaactcgacagcgtcttggatggcttcgacagtcatttgcgagtcgcctttgaaagaaatatgatccgtgatctggcgaaccagctcccggtcttccccgttttctgtgtgcaacatcgctttgcggatagctgttgctatcttttcttcgttgaatccaacgatacgtccatcacgtttaataactgtctgaatcatgataaatttattattgaggtttgtgaattttgtagttgcaaaagtatatagtatgacaatatggtaaactttttggaaaacttttatgcagttaaaatatgtcaattcgctgatatacaattatagattttgagtaattggaaaactttaaatgactatcatgttttaatgttgtccaaaagtgtatatctttttcaacttttcgtgtataatgtggaaaacttctgaaggaagtgttaacgtgaaaaaataacttggaaaagagatacacgctatgctttttttgtctaattttgtcttcggatcggtttcgtatgatcaaatcagatgatacggattaaaagggaatcgggtgaaaatcccggacagtcccgctgctgtgaagctccgtttcaacatcctgaaaactacttttgccactggtttatggttataaaccgggaaggcttcgggatgggagtcagtcagaagacctgccgttcattaaaggctattctttcctcgtggggtaggagaatggttcgaaaatgtttctaacttcataaatagtaaaaagatgaaaaagctttgcttgtgttgtggcacaaagttttccagcaatattgatttattgccaggcgactttgctgctacttatttttctatacataaatagtattgttattcgttgttagaatattgttcaatagtaattaaagtaagaagctccgtcgaagtgattcgccggagtttcgtgttttttaagcgcatagccggacgtttttttactgtcctcccataatatccaacagctcgttggtgatggcctgctggcgggttttgttatattgcaaggtcaattcctggatcaggtcgttggcattgtcgttggccgtttgcatcgccatcatgcgggcggcatgctcggatgtcgttgtgtcgagtaatgtcgtgtaaatcgttaggttgagcagcttcggaaaaagcaatgcctgaaggctttccggcgacggttccaggatgtaatcggttgtcggggcagtgttttcaaccgaggcctgtggcagggtgaccggcagatagactttatgggtcaatacctgtgtggccatattcttgaaatgatggtaaagcagctccactcgatcggccttacccgaagaaaagagctccatcagttttccggcgaggcggacagcctcttcgtacgaaggtttctctcctaaatgcaggaaatcgtcttcagtcgtatagccagccttgtgcaattcgtcggcaatctttttcccgatggggtagaggcagacggcggtgtgttgtgcttctaattcgtgcaaacgggcagatagctctttccatacgttggcattgaacgtgccgcatagtccgctgctggatgagaaaacggcgatagcgacctgtttcacctcacgcttttcagtgtaaggtgattccaagttgcattccgcatctaaaagaccgtttaagatggcggaaagtttgtttgcataaaggagtgtgtgttcggttagcgtctgggtatgatggagcttcgctgaagataccattttcatggctgcggtgatcttttgcgtactccggatagacgcgatccgaacttttatttcttttaatgatgccataatccctttttttaattgacaattaggtgtcgcttgttgtaattgtccattgtcaattgttcattgtcagttgttttgctgtttcttccagtttcttccggatatcgtcgttgatagttccggttttcaggatgtccagtacgtcgtgctggtgtgatgtatgcagttcgtgcaggaattccttttcgaagtcgtgcactttatccaacgggactcctttcagcaatccctgtgtaccgcagtagaggatggcgatctgctcttctacaggcatcgggctgtattggggctgtatcagcagttgcgtgttcttttgtcctttgtcgatcgtgaaagccgttacagcatccatctctccgccgaatttggagaatgattccagttcgcgaaactgtgcctggtcgatcttcagcgttccagccaccttcttcatcgcttttagctgggcgttacctcctacacgagataccgagataccgacgttgatagccggacggtttccttggttgaagaggtcagtttcgaggaagatctgcccgtcggtaatggagatgacgttcgtcgggatgtaggctgacacgtcacccgcctgggtttcgatgatcggcagggcagtcagggaaccgccgccttttaccttatccttcatgctgtccggcaggtcgttcatctgccgggccacttcgggctgattgatgatcttggcagcccgttcgagcagacgggaatgaaggtagaagatgtctcccggatacgcctcgcgtccggaaggacggcgtaggatcagggagacctctcgataggcgactgcctgtttcgaaaggtcgtcgtagacaactaaagcatgacgtccgctgtctcggaaatattcaccgatggcggcacccgcaaaaggagcgaaatattgcatggctgccggatcggatgctgtcgcgctgacaacgatcgtatagtccatcgcgcctttttcttgcaacgtgttgacaagcgaggcgacggtagaacccttctgtccgattgctacatagatgcagtagactgggttaccggcttcgtagttaccacgctggttgatgatcgtgtcgatggcaatggaggtctttccggtctggcggtctccgatgatcagttcgcgctgtccgcgtccgattgggatcattgcatcgacagccttgataccggtctgtaacggttcattgacgggctggcggaagataacccccggcgccttgcgttcgagtggcatctcacaggtttctcccgtgatttccccttttccgtcgatagggtttccgagcgggtcgatcacacgtccgatcataccttcgctgacattgatggaggcaatacgtcctgtgcgtttgacgatgtcgccttcctttacctggtctgttggtcccagcaggacagctcccacgttgtcttcttccaggttcatcacgatcgcttccatcccgttgtcgaactgcaggagttcgttagcctcggcattgtcgagaccgtaaatccgggctacgccatcgctcacctggagcaccgtacctacttcttccgtccggataccggtactgatcccttccaattgctggcgcaggatggcggaaacttcactcacttttatctgatctgtcatacttctttctgtttttatctgttttcgagtaaccggctacggatatcccgtagctgtgtcgcatagctggcatctatccggtagttcccgatacgcaggcggaaaccgccgatcagttccggttgtacgatgccggagaattcgatggtgctgcctgtctcttccttcagcttgttctggagatgtactttcacttcctcgcttaccggaactgcggtactgaactgcacgcgggtgatgcgtttgtctttccggtacaggtggatatagatatgcgccatgaagagcaggaggctttcccgtttatgttccagtacgaggtgcatgaaacgttcatacaagtcggagacctctatgccgcctgccgctgtcagcagcttgagcttttcctctgccgggaggatcggattgccaagggcgacccgcagtccgggttcgagcgagaagctgtctgccagcatcttcatatcatcgtatacccgcgtttccagtcctttctccttcgctaaggagaaaagggctttcgcataccgggaagagattgttcctatatccatacgttacgatttacaaaacgatacctcatccaacagccggtcgatgatttgttgttgttccttgtcgcggctgatcttttctttcatcaccttctctgctatggcgatcgaaaggtcggcaatctcggaacggacctcgcggattgctttctccttctcttcgcggatacgtcgggctgcctcttccacctgcaaacgagtttcggcggcagctttccggtgagcttcgtcgatgatttgttccttttcggcaaatgcttctttcaggatggcattctgtttttcctttgcttcggcaagtatccgggccccttcggcctggatattggcaagctgttcattcgcctggcgagccgtttcaagagagttgtcgatgtaggctttccgttgttccactgccttgatgatgacaggaaatccgtatttggaaaggatgacaaagacaatcccgaatgaaacgatcatccagaacagaagtcccgaatccggtgttaataatgacataacctgttactttttattggaacaaagccaggaaacataccacgatggcaaacaacgccacaccttcaaccagagctcccatgatcaacatcgaggtacggatctcgcccgctgcagaaggctggcggccgattgcttcgacagctccttttccgatcagaccgatacctatacctgcaccgatagcggcaaatcccgctccgattgttgctcccatcttcgctatgcccattccggcagctgcttgtaataaaatagtcgataacattgtgctttaaactttaaattagtaacctaatatatttaatctttaaccttagccaaacctatataattggctgacaataatgtgaatatatatgcttgcagacaagccaccagcaattccagacagttcatgaacgcgcagaacagcaccgaaacgatcgtcattccgaaattcaccaacaaccccatcgataccgtgataaagatcaggcaggtgagggcgaggatgatcgtatgtcctgccatgatattggcaaacagacggatcatcagggcgaacggcttggtgaatacgccgaaaaactcgacaaaaggcatgattggcaacggcagtttcagatagatcggtgctttcggccaaaatatctctttccagtattcctttgtcgcaaacaggttgacagcgataaacgtacatcccgccaagacggccgtgaccgcaatgttgccggtgatgttggcccctcccggaaagaccgggatgattccgatcagattgttgatcaggataaagaagaagaccgtcagcagataagaggaaaacggcctgtactcttctttgccgatcgactccttgatgacgccgtcttgtatgtaggaaataatcatttccatcaagccggtaaacccgctcggaacctggttcggatgtctcttgtaccaacgggcggtccgtagaactacgaacagcaggatgccgcaactcaggaacaggccgcaaacattcttggtcagcgacaagtcgaccggacgcacctcttctccgcggctgttcttttccaccaccttgccggcgtgttcgccttctgtagcgatataatagttgtgatgcgcttggccgtgatgtaaatggtgggagaggaacatgtcccatccacgctcttcacttttgaccaatatcggcagagagatggcgatctcctttccgttccattcagtaatatgccaggtgtaagcgtcttggatatgcgaaaagacaatatcctggacatcgatgccttcctttttggaatcagcatgagccggggccagaaaacagagccacatcagcaatactatccatatcaacctgttatttttgatattgttcatcattttcctttttctctcttttcattcttttcttctcgaacagataaaccgtatacgtttccaatcccaaatagataaaatagaaaagcatcagggtgaagccgaacattctcaaattttctctgaccagtgcggcataaagccacaggaaaacaacggcaagggtgaacttgcagaaacggactaccatgaaagcggtaatcgtcacatcgccgttttttcttttcttccggtcaagtatataggtcatcacaattgccatcacccagtaaaagatcggaatggaaggataccatttgaaataatgatccggccagatcgtgtataataatcctcctaacgtcacaccgatggctgcattgataaatgtaatcaatcccatcagctttaattttaaccatccagtcatgtcgtcgtatatacttttatttattcgatgcaaacagatatgtaatcatccttaacctctacgaatccgctcttgatagcctgttcgccttttttgccatcgtgttcatattggatggttccctgtcggagggcggctatcagcggggcatgatgggggaggatatcaaatgaaccggctgctcccggaaaggaaacacgctctgcttcgccttcgaaaagaatgccgtccggtgatacaatttccaatctcatatccatttttaatttgcttgttcagccaatcgctttgctttttccatcacgtcctcgatcgtgcctacgttcaagaaagcctgttcggggatatcgtccgtctctccgtccatgatcatcttgaatcctcggatcgtatcttcgatggggaccatgacgcccggtacaccggtgaattgttccgccacggagaacggctgtgaaaggaaacgctgtacacggcgagcgcggttgacggtcaggcggtcttcgtcggaaagttcttccatgccgaggatcgagatgatgtcttgcagttccttgttgcgttggaggatttgtttcacacgctgtgccgtttcgtaatgctctttgcccacgatcaacgggtccaggatgcgcgaagtggattccaacgggtcgacggccggatagataccgagttcggtgatcttacggctcaataccgtggtggcatccagatgtgtaaaggtcgttgccggagccgggtccgtcaggtcgtctgctggcacataaactgcctgaacggaagtgatggaacctttcttagtggaagtgatgcgttcctgcatggctcccatctcggtggccagtgtcggctggtaaccgacggcggacggcatacgtcccagcagggcggatacttccgaaccggcctgtgtgaaccggaagatattgtcgataaagaaaaggatgtcttttgtttccccctctgccgccaggtcacgaaaagactcggcgatcgtcagtcctgaaagggctaccgaagagcgggctcccggcggttcgttcatctggccgaagaccagtgtcgcctgcgacttggccagttcatcataatcgatcttggacaaatcccaatgacctgcctccatgcttttcttgaattcttcgccgtagcggatgactccggattggatcatctcgcgcaacagatcatttccttcgcgtgtacgttcacccacaccggcaaagacggagaatccgttgttcttcttcgcgatgttgttgatcaactccatgatcagaaccgtctttcctacgccagctcccccgaacagaccgatcttgcctcctttggagtaaggttcgagcaggtcgatcaccttgataccggtgtataagacttcacggctggtggtcaggtcttcgaacttgggcggttcacgatggatcggaagagcccctttcttgtcgagttcggtcattccgtcaatgggattccccgttacgttcatcaaacgcccttttacctggtcgccgaccggcatcgtgatgggcgaaccgtgcgaaatggcttccattcctctcttcagtccgtctgtcgtatccatcgctacggtgcggaccgtgttttccccaatatgctgctggacttccacaatcaggatttttccattggggcgggttatctccattgcatcgtgaatgcggggaagtgttatcttttcttccttgccattatcgaaatggatgtccacgaccggaccgataacctgtgagatataaccttttatttctcccatacaatctcttttttccttaatcctattcaaatcttcagctgcaatattacgaattatgaatttccgaaaaccggaaatattactttttgagtctttttgtacttagttaaatattcaactaatttcaacctcttctaaaatgaaccaatcgagttctgaaatgaaccaaaatagcgggaatagcttattttgtaaaccatagagatagaagattctaagcatgatatgccgttatgttggcgaaaaacagatgaaatgttttactttgttaaataaaaaggattactcatctgttttttctacctttgcaatcggattatggtgtaaccgtatttgcttccgctgacggttagtaaaagggaatccggtgaaagtccggagctgtacccgtagctgtaagttctgaaaccccggcaaatcttgttgccactggtggttcggttgacaattgagaattgacaatttgaacaccgggaaggctgccgttagttgataattgtccattatcaattatcaattgaaaaggggggaacaagccagaaaacctgccattattcggtatccggttcctcgggtaaaggaactgatgaatcgaaaaggtatgcagaatatatttgtaaaacgattgtcgggcctgttatgtgcctggctatttccgtttgccgctttgtatgcgcaggtagacacgacgacctatcaccagctttcgggtgtcgaggtgctgggaaaggtacgcccttccaccacccgcgagagcacgccgctccaggtgatggacaaggccgggatcgaacggctcggtgtgcaggacttgtcggaagccgtaaaacgcttttccggtgtgaccgtacaggattacggaggtataggaggtttgaaaaccgtttccgtccgcagcctcggtgccaaacatacggctgtctgctatgacggggtgacggtcacggacgcacagagcggccaggtggatatcagccgcttttcactggacaatgtcgatatgatctccctgtcgatcggtcaggccgacgacatcttccagacggcacggatgtatgcttcggcaggagcgttgagcataaagacaagtcggcccgtattcactgatcgttcgtaccatctgaaagcacaagtaaaagccggttcgtttggtttggtaaatccttatttacggtatgagcagaagctggggaagcatttggtggcaacgggtcaggtcgattggttgcgtgcggatggacgttacccttttgttatccagaatgaacagaaggaggagtcggggaaaaggataaacagtgatatccaaacattgcgtacagaattgaatttgtttagtgatttaggtaaaggtggcgaactgaatctgaaaggttattatttcgattcggagcgagggttgccggggtcggttattctctataacgattatgcgaaagaaaggctatgggacaaaaactatttcgtacagggctattataagaaacaatttgaatctaatttctctttgcaggtgcaagggaaatataattattcttggaataaatatgttgactttaataacaattatacggaggggaaacaggaagaccgccatactcaacgagaatactatatttcggccgggggattgtatacgccaatcgagcacttgtcattttctttgactacggatttctctgtgaatacattgaagaacaatctgccggcttgtcctttccctacccgatatacctctttgtctgtgttggcagcgcaatataaagacaacagattgacgacaacggttagcttactgaacacttttatcgcagagaacgtaaaaacaggagataaaccttctgaccgtaaacgattatcaccaagtgccagtgtctcatggcgggttttacctgagcagaatttacggatacgtgcttcgtttaaggatattttccgggtgccgacttttaacgatatgtattatttgaggattggaaataccaatctgaagccggagagagcgacacaatacaatctcgggataacatggggagatagtccttcttcggcattgtcttatctgaatctttcggtagatggttattataatcgtgtgagagataagattgttgcccttccaaccctttatatctggaaaatgatgaatatgggtgaagtggcgattagtggaattgatgcaaacttgtcagcagaaatatcttgttttgattttgctgattttctgttacaaggtaattacacctggcaaaaagcgatcgacattactaatgaatctgcaaagaattatcgggaccagatcccttatactcccaggcatgcaggttcggcctctttatccatacaaaataaatggttgaatgtctcttatctgctttcttgtgcaggtgatcggtattcattacctcaaaatatcaaggagaataggatagataggtatatagagcagactatttctgtcaataaagagtttagccttcgtgattttaaactccgtttgcagggggaagttctgaatgtcggaaatatcaactacgagattataaaatattatccgatgcctggacgttcctaccggatattagtatcatgttatttttaaatgattaattataaagtaagaagaatggaaaagaagtatttattatttgcgttatgttctttcatgaccatgtcgtttgtttcttgtgataatgacgatgatccaaaaccggagattcctactgaaagctctaccacaggcgtttattttttgaacgcaggtaaactgggcagtaataattctactctggattattatgatccggaaacaaagaatctgaccactaaagtgtttgcaaccgagaatggccgtggccttggcgatacggcaaatgacatgcttatttatggttccaaaatgtatattgcggtcaataaatcagcaacaatcgaagtaacggatttatccggtaaatctttgaagacaatcagccccaaagatgaatctaatgtacctcagcaaccgcgtatgctaacggctgccggtggaaacgtttatgtgacattgtttgacggacatttggcttgtattgatacgacttcgatggagatcgtaaagaaagtgaaagtgggtcctaatccggagggagtttgcgagttgaatggaaaattgtatgtggcaaattcaggaggttataatctggtgcaagactccacactgtctgtagtcgatatgaatacatttgaagaagttgaaaagattgtagtgacaatcaatccgaaaacgatacaaaaagatgataaaggtaatttgtatgttttatctttaggaaactggggaaacatcgggaatgaattacaacgcctgaatgttgcaacaggtgaccgggaggttattgaggccaatagtcagatcgtttcgactttatgtaatgataagatatatatttatagtgctgagcaagaaaattatattgttacgggttatgacttcaaagtatatgatattgaaaaaggaaagatagaagaaaagagctttattgctgacggtacaaaagtggataacacttattgtatgagttctgaccctgttaccggaaatgtttacattggaacttctgattataccagtacgggtgatatgtttattttctctgccaaaggaaagttgatcaatcaagttgccttatccggtttgaatccgatgggggcttatttcttgacaactcaaaagtaagagtcttttttaatgagatatattgcttatctattattgactttttgggttgtggcttgttcacaacccaaaaagtcccattccgaaaactccctctcttctgacaccatccgctacgcccaggggtttaccgtgcatcatttcgatggctatacggctgttgaagtgcgtgatccgtgggatagtacgcgcctgttgcaacggtatcttttggtagaccgtgaccggcctgttcccgaaaaccttccgaaaggaacggtcgtgcaggttccggcacagaatgtcgtggtttatacatccgtgcatgcggctattatcgaccagttgggcgagacagggcggatcataggcgtttgcgagcctcgctatatggacacccctgccatccgggaagggctgaaagccggacggattgccgatatgggagaggcgaccgcccctaatgtggagatgatgatcgacaaaggggccgagcttgtgatcgtttcccctttccagaatagtggctacgggccggtcgagaagttgggaatccccattatcgaaggagccgattatatggaatcgctgccgttgggacgtaccgaatggattcgtttctacgggatgctgttcggtaaggaagcgttggccgattccattttcaggcaaacggaaaagagttatctcgatctgaaacagctggtcacggccgatatgcctcgcccgaccgttatctccgaaaagaagttcagcgcttcctggtttatgccggcgggagatagctatatcgccaatatgtatgccgatgccggagccgattatgttttcaaggaactccccggagccggaagtacgcctttggctttcgagacggtactcgaccgggctatccatgccgatatgtggctgattaagtataaccagtccgaagacatgacctacggtgacctgcgtgccgaatacgcgccgtacgagaacttcgatgcctttaagaaccgccggatttattcctgcaatacgggacttgtcccttattatgaggaatttcctttgcatcccgattacctgctgaaagacctgatctgggtgttccatccggaattgctgcccggctacagtccgcgttactatcggaagatgcaggactaaccggcaatgaaagtttgtggagaataatctatatgtttgttgcatagtggattgtgtagatgaaggattttttttcattatcgatgacagtacgaagataaggccccgctacaggcaggaataccgtttcgggaagatcggcgaagatcggtgcagaaacaggtaggaagaggtaggaaatagatgtcattatattttgaatatcagcatttattgcttatctttatagggcaatgaaacgatggggatgaggaggaggaatgaattcgacgtcaggcgttacgggtagcaggtatagacggccctttacggtccggattcgatgtcggcatcagctgataacggttgtccagttggatggggggcaaacccggagctgcaggtgaggatgatcgtgcaatatcaaggtgagccttgaaacaagggacttctgtgtacgaaacaagggactttgacgtgtcaaaccaagaagttcgggaggtaaaagaccggacttccggatgcgaaagaagggatttttctcgttcctgtcgtgtctttttctatgccggtttaaaagggcacaaggaaatgagtttatatatatatattattaatatatttattctaagatgtaggattgaaacgcaatgaacgaaaaacctctgtaatctgcttgcaatgaatggtttatattgagacattgactgcaccgtttgtttgccttggtgaaatcggagtggcggtaattgttaaaacacaggtacagttaaggtccatcaggtattcgttttttgtaatgaagtcgttgataaaagaagtatgtgtcagaccatattccacgattaatgattacatttgtgcgtatagattgtgattgagtctgaataagatagttcaatatggcaccttccttgtcgttttgattcttgtcgtggcatgcaatcaagacaaaaggaaggaagtagcggtgcaaagtgtcaccaacaaatgaataatgaaatataatttcaatttgcaatgaaaaaaagaataacgattgggacgcttaccctcttatctctcatgggaatgttcggctgtaagcagcaggaaacggtcgaggcacttatgactcttgatgtaaaagccgattatccggaaaaggaatgggttgttcaagactttttggatgtggaatacatcccgttggaaacgaacgacgagtttatcacccaaggcagtgtcaaggcgataggaaagcggttcgtgctggtgacgaatctgctcaacgatggcaatatcttcgtttttgacagaaagacaggcaaggcggtcaggaaaatcaatcggaagggacagggagccgaggagtatgcttttatcaacgggatcatcctggatgaggaaaaagacgagatgtttgtcaatagtgcttcgaacaagaagatattcgtctatgacttgcaagggaatttcaagcggagtttccagcatgccgagggcgcgcagtatctggatgtgttcgattatgacgccgacaatctgatctgctacgatatgtctgcttcttataaggacgggcagaaaagggataaggagttttaccatgcactcatatcgaagcaggacggaagtgtcacccgggcaattccgcttccttttgacattatcaaggctccgtttgttcaaaagggggatatggttgctgttgcttccgttcgctctatcacgcctgaccagggaaactggctgcttgccgatacctcttccgatacggtgtatcgctatattcccggaaaagacaaattaatcccgttcatcgtaaaaaagccggcggaaaatccggatatgttccttacgatgggggtgaacactggtcgttattgtttcatgcaaaccattggaaaagagtttaattttgaaaaaggaaggggtttcccgactacggacttgatgtacgacatccgtgaaaaggctgtattcaagccgatagtgctcaatgctgattatacgacccggaaaaggttggacttgatatcccgtctcggaaacgaggaagtggccgcctatgagaccctttctgccgaccggctggttgaggcctacgggaaaggtgagttgaaagacgggttgaaagagattgcggccggtttggacgaagagtcgaatcccgtgttgatgttggtcaagcataagagatagaaccggaaggaaataaaatccccccgtactcttacaagcgagccgggggattttcagtttggcatttttattatagggagttgttttaagttatcatgcccagccgttcaacattccgtagaagtacatgggtttcaggaaataaaccttcagcagccatgcggcccattgctctttcgatgtgtccagcaacgtgaacgggaacgagttttgcgcctctttcttatagttgaactcacacaagagaacatgcccgtagtccgtcacgatcgggcaggcggcatatccgtcgtatttctctgccggttctttgccttccatcagcgagatcaggttcttggctgcgatcggcacttgcttgcggattgctgcggatgttttgctggtcgggattccggctacgtctcctagggaaacgatattcggatatgttttgtgtaccagtgtctctttgtctaccataacccaggcatcggcagccagtttaccttccgtccagcccagtccggcttctcttacaaaatcgggggccgacatcggcggtgtgaaatgcaggaaatcataatcttctacaaacggagtgtagactttctgatcgcccactgtttcgatcttctcgaaatgaacctgtttggcagccgtatccacacctttcactcgtacattcaggttgataggaatgttacgctctttgtagatttccaacaagcggggagtgaaaaacgggacatcatacagctctttggatgctgtgtaaaaattcagatctatcgtttcgcgtgtaccctgtttgcgggtatagtgttctgtcaacaaacagattttcttgggagcacctccgcatttgtgcttggtataagtatcagtgtagattccacgtccacccgtcttggagaattcctgtatggctttccaagtcttttgtgcaccttcgaaatcatagatgctgtgggcgttcccttgtccaagtgtcgcttgcgtgataccttctaccttttcccagttgatttggattccgggagtcaggaccaggaagtcgtaggcgatctttccgttatttttggtcgttacctgattccatacgggatcgacggcagcaacagaatctttaatccatttgatgtcattgggtatgcagtcctcctgctttctccagacgtcatccggttgatatacacccgatgcgattaaggtgaaccccggctgataaaactgacggtcactgggatcgatcaaagtgatatccggcttgtccagccaactctttaaacgggcagccatactgataccggcagcacctccgccgataattacaattttacctttggctttgcttgaaaatgcttttgccttttgggtacttgcagcagtcagtaaaccggccattgccatcagtttgaaaaagtggcggcggtcgatacctttcttctcgaacgcctttaattgatcttccagttcgtgtttcatcatgtatgaaaattagattttgatcgcaaagaaaggataatccgcaggagcgtacaaagaaaggactactacatggcttgcgcaagtgctttgagtggaaagaaatactacaacattactttctcatgtctttttatgatgcatttaattatctgatatgtaatagtatataagatgtgaaaatctgagaaaatattttcagaaattcattaggaaatcgacgagattcgtatctccttccagctccaaacgcttccttagacggtatcggcgcagctctattgcccgtacggatacgttcatgagggatgctatttcctttgtggagagattcatgcggagcaagcaacagatgcggagatcgcctgtcgtgagatcgctgtatcgctgtctgaggcggtccatgaaattttggtgcgtgctgttgaaatagctttcgaacagtacccagtccgcttggttgttcaaagtctcttccatcagcgtcttcatgcggatgtagagtttgttcggataacgttcgcctagcgtttctttttgtttttccagttcttccaacaggctttggatggcctggttgcgtttgacgagggctgttgtctgaagtgtcagttcgttgttcttgttttgcagttcggcttcgagcatccggttttttatgacctgcatctgctgttgctcggcttgccgttcggcttcggctttttcctgttcttccttatgcaggttcttcaggttgtagcggagcacggcctgtacgagaaaccagacgagtgtgatatagaccagccatgcccatacggtattataccagggagggcggacttcgatgggcagtgtgagttcgggatagggacccttgatgacgtatttgcggactttcaattcatacctcccttccggcaattgcaggaaagtgattttcccgtcgtgttgccaggctgaccagtctgaagatacgccttcgatcttgtagctgatctggtggttggaggtgaatatcgtggtgcctgcccagacattgaactcctggaagttgtgcgggagagaaatgcgttgcgtgttgatcggcaagtgatggataccggaagcatcgacgtattcgagtcccgaaactttcaggggagtgctgcccaggctattgccgatcagttcccggatattgaccaataaagttccttgcatggcagagaccaagaccagggagtcgttcaaagggatgatccgtttgcctctcgtcacgaggttcatattgtaattgtcgaagagcaggcggcatttcaatgttccgatgccgtccgctacgtgaaacagtccggcttcgttttcgatggaaagccagtagaggttgtcaccggccggataaacatgttcggcatcggcaaatacgcccactgcttccgtgtccctaaataatttcttaacggtcggagcggggtctttttcgatcctaaagcaaggttgcgcttcggctttgcttacggcgatgaaagggcttgtggctcccaatgagcgcttgaaatagccgaggttggtttggatatacaactcttcgccatccagtccggcattcaccagtttgccgatctcgcttctttttcctaacaaagtgatcggaggatcgaaagagatttgtgataatccgttgtcgagcgccacccagatttgccggttgtcctgtacgcagataaagcggacgatattgtcttgtagttggttctgtaaagacaggtgttgcaggatcgtaccgtcggagtctgtgatatataatccttgtgtgagggttccgatgaaaaagagcgttccgttggtagcgaaggcactcggctgtgcatcctgtatttctttcggtaaagtaaaaggtatttcaacagggggtggagtgaagcggatttctggcgggaccgtgtccagcgggtggtagcggaggattccgtctttgtcgtatgtccagcttcccaacatcgtttcgttgcgggtgtagatcgtgtcgttgtagttcgttacgccggtcacctcttcctgtcccggcagcgaatatagtttccatgtgttgccgtcgaaagcaagcaggccggaattgttggcgacatacagcataccgttgggtgtcagcgaaaagccccagttctggcagctcgctttataatcgtcgaccgtatagttttttacaaatacataaggaatggctactgacgcgcgcatggcatgtgccgtgaacagaaaagaaatgagaatggtcagcagtctgtacataagtctaaatgaatataggcacggaagtccaatacttccgtgcctgaatgaggttacaaatataatgaaattcctatttacttgtattcctgccagctcttaatctggatgtctttttcgtccatattacagaaagcgctgatgaaagcacttgccaagcgggcgttggtgatcaatggaatgttgtgatcgatcgctgcacgacggatcttatagccattggtcagctcgcgcttgctgtggtctttcggaatgttgacaaccagttcgaacacgtgcttgctgaacatatccatgatgttcaggtcgccctgttcgtccggccagcaaactgctgtcgcagagatgccgttttcattcaagaatttagccgttccagccgttccgtagatgttgtaacctttggctgccagcatatggcacggttccagcagttcagccttgctcttggcggcaccggaagaaaccagtacgttcttctgcgggattctatttccgacagcgatcatggcagaaagcaatgcttcgttgaagtcgtcgccgatgcagcctacttcacctgtagagctcatatctacgcccagtacagggtcggccttatgcagacgggcgaatgagaactgcgaagccttcacaccgatccagtcgatgtcgaatgcactcttgtccggtttggtgtaaggagcgtcaagcatgatgcgggttgccgtttcgataaagttgcgtttcaggacttttgatacgaacgggaaactgcgggatgcacgcaggttacattcgataaccttcacatcgttgttcttggctaggaactggatgttgaacggtccgctgatgttcaactctttggcgatcattttgctgaccttcttgatacggcgggctgtttcgaagtagatcttctgtgccgggaataccaatgtcgcgtcaccggaatggacaccggcaaactcgatatgttcggagattgcgtactcgaccacttcgccattcatggctaccgcgtcgaattctatctctttcgccccttgcaggaattcggaaacaactaccggatattctttggaaaccttggctgccaagtttaggaattcgatcatctgctccttactgtggcatacgttcatggctgcgccggaaagcacgtaagacggacggatcaggattgggaaaccgacctttgcgataaaggcgtcgatctcttccatgctggtcaactcggcccaacgtggctggtcgatacctaacgtatccagcattgcggagaatttgtgacggttttcggcacggtcgatcgacagtggtgaagtacccaatacaggtacgttctggcggtacagtttcatggccaggttgttcggtatctgtccacctacggagacgattacgcccttcggcagttctaagtccatgacatcgagcacgcgttcgaacgaaagctcgtcgaagtacagacggtcgcacatgtcataatcggtggaaaccgtttccgggttatagttgatcatgatggatttatagcctaacttgcgggctgtctgtgcggcattcaccgaacaccagtcgaactcaacggaagaaccgatgcggtaagcgcccgatcccagaatcacgacgctcttgtcgttcggatagtaagagatatcgtgctggctgccgtcgtatgtcatatacaggtagttcgtcagttcgggatgttccgatgcgatcgtattgatgcgttttacactcggcaggatacctaatttcttacgcaggttgcgcacgcggatattttccttttccatgttgccttccgggttttcaacataacgagcaatctggaagtcggagaatcccaggcgttttgcttccttcagcacatcttcaggcaggtcttcgatcttatcgtaagcagacaatactttcgtatagtctacgatgtttttcagtttttccaggaaccacggagtgatcttggacagttcgtggatgcggtctaccgtgtagcctttttcaagcgctttggccacggcgaagatacggaggtcggtcgggttggccagcgcgtcgtccaggttatcgaattccacgtcgttgttgccgacgaaaccgtgcatgccctgtccgatcatacgcagacctttctgcatgatttcctcgaagctcttgccgatcgacataatctcgccgacagatttcatgctcgaaccgatctggcggcttacaccgacaaacttagtcaggtcccaacgcgggatctttacgatcatgtaatctacttctggtgctttgtaagcggagttgggagttcccatctcaccgatttcgtcaaggctgtaacctaatgccagcttggcagccacgaatgccagcggataaccgctcgctttggatgcaagtgcggaagaacggcttaggcgggcgtttacttcgatcacacggtaatcgcaagtatcggagttgaatgcgtactggatgttacattcgccgacaatacctaaatggcggatcgtcttgattgaaagttctttcaataggtccagttctttgtctgtcagtgaacaggtaggagcgacaacgatactttcgcccgtatgtacgcctaacgggtctacattttccatgcttacaaccgtaaagcagtggtcgttcttatcgcggattacttcaaattcaatttccttccagcctttcaacgattcttccaccaacacctggggagaataggcgaaagcgctttctgccagcgtacgcagttctgcctcgtctttgcagataccgctacccataccgcccaatgcgtatgcggaacggatcatgaccgggaagccgatctcgtaggctgccttcacggcatcttccaggtttccgacagcgtggctaaccggagtttttactgctatctcgtcaagtttctttacaaacaggtcgcggtcttccgtgtacatgatcgcttcgaccgaagttcccagtacctttacaccatatttggccagtgttccgctggtatacagttcggttccgcagttcagggcagtctgtccgccaaaagccagcaggataccgtccggttgttcttttttgatcacttcttcaacaaagtaaggagtgatcggcaggaaatacaccttgtcggctaccccttctgatgtttgaatggttgcaatgttcggattgagcaatacggtgctgattccttcttctttcagcgccttcagtgcttgtgaaccagagtagtcaaattctccggcttgtccgatcttcagggcacccgagcccagaacaatcacctttttgataccacttttcgacatagtaatttgggttgtttaatttattgattttatagaatgttataattgccttacgagatcacaaggtgcaaaaaaaatgcgttagtaaaaataactaacgcatcctatataaccaaatgataatcctttaaaataaaaaaatgagcttcattgtccgacatataaccggaaaagtacgctggattatccttatgtgctttctgtgtcatgaaactctatcttcaaaatttcggcaaagataaggcttatatttcaaacatgcaagagatgttggtgccctctttctgaaaaatacttttcaagttgaccgaaatgtccggaagataattttattttcctatctttatccccatcaatcattcaaataattctgatattatgaataagacactttatctcatttttatttgtctccttctatgtgccggcacccgtcttgttgcccagacttttgattataaccgagtgagtggccatccccgcttattgatgaagcagggtgaggagcagcagatacgagaaagcctgaaagataaccccgaaatgcagcgcgtctataagcagattgtcggagaagccgaccggctgttggtctgtccgacgttaacgtataagaaagagggacgtcgtctgttggccgtttcccgtgaggctttgaaacgtatttttgacctttcgtttgtataccggatgaccggcgaagataaataccgcttgcgtgccgagcaggagatggtgtccgtctgctctttcggcgactggaacccgtctcatttcttggatgtcggcgagatgacgatggcggttgcgatcggttatgactggctgttcgataagctgtctccggagacaaggagagtggtacgtgaatcgattcttcagaaaggttttgctccgtcgaacgacaaacaatataactggttcctgaaagcagaaaacaactggaaccaggtttgcaataccgggctggtatatggagcccttgcccttttggattcggatagcaaagaagcggctgccgttattgaacgggctatgtcgtctgttcctctgtcgatgaaagtgtacgcgcctgacggcaactatccggaagggtataattattggggatatgggacgagtttcaatgtgatgctaatcgccgctttggaatcggctctcggttcggatggaggactgagtgcggtggagggctttatgtcttcggcccggttcatgcagtatatggcgggaacgaccggtcttgccttcaatttcagtgatgcacgcgaaacgactcaatcttttccggccatgttctggtatgcatccaaattaggcgatccttccttgctctggaacgaaaaaatattcctgacacgcgaggatacgcattttactgcggaagaagagcgtttcctgccgattatcttgatctatggttcccgcttcgatatgaaggaagtgacgcctcctgtctcgaaaatctggaccggacatggaaaagtgcctgtagctctgatccgtaccggatgggataagggtgaaggtttttatgtcgggataaaaggaggaacggcttcggccaaccatgctcatatggatgccggatcatttgtgttcgaagctcagggagttcgttgggcacaggatttgggtatgcaggagtattattctctggaaaaggaaggcgtacgactgtggaacggtgatcaggacgggcaacgttgggatgtcttccgctataataactttgtgcataatacgttgacggtaaacggagaaaagcaccaggtaaaaggagcggttccgattctcgctacttatacgaaagatgcacggttgggagccagcttggatatgacttctttgttcggtagtaatctgaagaaagcgacacgcgaggttgtgcttgtgaaggaacggtatttgcaggtaacggatcaggtgcaggctgccggccaaccagcttctgtccggtggacgatggtcacctccgccactcctaagctgctcgattcccacacgatagaattgacgaaagaaggtaagaaattacatgtgattatcgacagtccttcggctgccgccttctctgtggtcgataatgttccgtcgcatagctacgatgctccgaatcccggttctgtccggattgtttttgatgttgatgtgaaagccggtcggaaggaaacattgaaagtgcggctggttccggttgtggaataatacatgaatgtaccgatatgccggggtacgacaataccgctgaatgggcatatcggtatgcttcaattcctatttgttatttgccgaaattccagttcctgatgatttgcagtatttcctctttcatttccttcgttatgttgttttgtgtactgggctggaaggcgagaaacctcttggctgctttatggaatttgtccggatgtaaaaaagaggggtttgtatacaatttggcgagtaggaagtaggtatatccctgttccggtaaaatccggctgatttccagcaggtaactttccgctttctggtattgcttgatcgccttttcgttttttgcaattgcatagtatagttcgggggctgcacttagttttaatgccctgtccaaccatttgatggcaatatcgtgctgtccggtcttatagaaacattctgctccctcatatagaaaatctgtccggtggtataactggacaaacagaccggcataccggctggctgcctgttcgtactcctgattatgatataattcctgaagcgtcttccattccctataggtatagtaggtatctttctgtccgtagaaaagaatgcaggtaagaatggcggcgatggcactgatatacgggatactcctctgtgctcgctgcttgttatgcttcggattggtcacacatatggtggtcaggaataagagcagaacccagtaggtcgggagttggagcggataggaataaagggcgaagattccgagtgccagaattccgccggatgctcctatctgtctgtgtctgatcccataataaagggaaaatgcgagccagaagataaagaacagtaaccccgtaatacctaactcaagtcctatttgcagatattcgttgtatgcatacaggggacaggttgcggtttgtttttctttggaagaagcggtatcggtttcgaaataggcagattgttcctttgcgtatgtggctggaaagccgcctatacctatgccggttaccggatgttccatgatagcctgggtcgtgatattccagatcaaaagccggcgatctccggcctgggctttttggatattcccgaccaaaatgactgccgtgatcgcaacaaacaggataatcgaagagatggcaaacagctggatgtggttctgtatggcttctttcgtctgtttccatccgatcagcctcatccagcaaacccagattccggaaaggagggctgcaagccatacgggttggtctgttttgaatattaaggtggtgataatcaaagtagatccgagaatggaaaaatagaacaggaaagtacgggatttccacaaagcgatcttgtcgcaattcttaaaacggagtaatgtgttcagacagactggaaaaatgactgcgatatagccatagaaaggctctggtttcagcgatgtttcaagcagcctgaagacaggatgggtgatgggagcaggattgatggtatggctgatcccccagatggtcggaacgattccggtaaatatgatgatcgtaatgaaaaacggtcgtaattcctgatgcgcctgtaaagcacctctgagcataaaccagagagcaaccagctgagcgatgaaaaggaaacgttccggctgaagattctcgtctttgtcgtaagaaaccaatacgataccgaacagaagtaataataaggcatccggtaatgaaaagataaaacggcttttctttgttgtgaattccataagtagaaccccaccggctaacaatagagatgtgaaatgaaaccagcaaatttttccggacagcgtgccgtctgctaattccggattcatggcgaagattatacacaatagtaacattccactcgttgcgagtaaaagtaatcttagataactaaaaaaattattcataattatatttattaaaatgtgaaaaaactctgctttctgtgggttgagaggcagagaccttctcacaacttatctgtcaggcattgccaaatggatggcaaagaaatggaccgatgcaagtataccctatttaaacagaaagagaagccagtgtgttttccttttgagaggaaagatttgaacaggtctaaagaggtcgcaaaagtatattttgctttattggagggtgaatattagagttgacattttgttgacaatatgcaaacgactggcatacaaaatattttgatgataaacggtaatccttatttgaaaggggaaagttaaggttagggttgtttttttaatgtgaaaagaggtaaatagaggaagattcctaagatagacatggcaagcccgccgatggtgccggcggcaagcgggaaccaaaacgcttccttatccggacctaacatgaatgggatgaagcctaagatggtcgaaacgactgtgaggaaaatgggcgtgatcttagcattccaggctttcagatatgccttgtagggcgacatcaacggtttgcgttgccggatttggttgtattcattcaaaatgtagatgcttgcgttaacggttatgccgcacaataggacgaaggaggcaaatcctccttggtcgaaattcaatttgaaccaatagaacgtgaggaatacgccaatgtaagagatcggtattacaaagataacggccaacggctgtttcagcgaattgaacaggatactggtggtaaagaagataatgacgatgatcagcaataacagaagatattgtttattgtcctttttgtcccaataccagtaagcgctttccgacttggcggtataacccatcggcagtatggcattgatttccttcaggtcgcgttcctgtatcttatttccttgattggaagccccgatatattcgtattgcagacagaggcggtattgttggtttactttgcaaaccttctgcggcatctgtcctttttcgacacttgcaagttctgctaacttgtagggcttgccgtcaatagtttgtggaacatactgcatgctccacacatcgtattcctgtgactggcgggaggagagtttcagtttctctgtctcttcgttgacgacgatcgtcccggtataaatgtcctttccgaaaacgggattgatggaggcgaacaggtcgatcggctgtatgtcctcctgggtcagccgggctttgttgaggttgaagtagaactcctggtaatcgtctttccaccacgagaactctgaattgatcagcacttccttgatgcggcggtgggtgagcaacttggctttcagctgttcggcccattcgtacagctcgtcgtagttgtaaccatacatcacgatacggaaagaaccggctccttcgcgcacatcgttactgaatccctggtcctgcaaaccgtagatttgccagcttcccccccccaattcaagagctttgctgatgattttgcttttcaatgtgtacgggaaaccactccgttcactctctttcgtaaaatagatgcggataccggcctggcgtgcgctgtagacgtttgtttggaactgtcgtatttctttgaaggtgctgagataggcttccatccggctcatcaaggtattcatttgtggcaaggtcgtcccgttcgggagcgatgcgctgacagacaggatcgtttcttcgttgcgggtgaagtaacttccttcataaactttttgtacgaacaggcgtagggtcccgcccaatgccttatcgacgatgggtttgatcttctccttgtacgtctcgttggaggcgaatttattatatgtatcgattagcagggtgtctgttgccgtgtagaccttctttttgtctttcgtgtcgtattcgattttttccggtaacaggaaaaccgggatgccgaatgctaacagtaaaatgaaacatgccaatttcttccatccgcaaaggaaatcgatctgacattgatagtaccggttgtagtagacagggaaacgtttgagaatgcggttcgttctttttctgatccggcttttccatgtatactcggtctcttctccggatatgttcttttttccgctttttttccattccaggttcatcttatcgattagggcgggaaccaggaaaagcgcgatcaatagggagactcctaaattgatgatgacgacagccgcaaaatcctgcagattgaggcgtatcttttcatctaagaaaaagataatgaccagtgcacctatcgttgtcaaagtggctgccaatatggataggattgcctttcggttatgtcggttccggatatgttccgtcatgacgatcgtgttgtcgatcaccaggctgagtgagattgtgacgcctgccaacgaataaagctgcatttccagtcctgacagataataaaggatgacagcaatactgaggttgatcgaaaggctgatgatgatcagtaacagatattttatctcgcgtgtgatcagcaagacaaacatcagtaggatcaggacggtgagccccgtacggacataaatcttgttcagttcgtcctgaatgaattcggtcgcgtcatagctggtatgtatttcataaccgggtggaagcaaggtacggatatgttccatttcggctcttacccgtttggcaagttccagctggttcgccgtctcctcggcgcggatggacagatagatggaattcaagccgttgatacggtaataactctgtggagcctcttcctgacgggtgacttttagcagttggtccaggcggatcagcttgccgtctttgttcaggacggttataagcgatgggttgaatccgtctgtttcgttttcaggaaccaaagcgagacgtatccactggctactttgtcctcctttgcacgaagtcgccaactgggtttccacgtttccggttcctaagaattctttttgataatactggctgatcgctttctgtatatccgggatgctgatacctaacgttgccagctgacggctatcatattccagtcgccattccatcggggtggcaccgctgacatcgatgcggtagatgccgggaatcccgcttaggcgaggttttatctggtcttcggcaaagcgttgtatgaatatgggtgtggctgccgcattcagtgtgtagctcatgaaaggccgtacttccttgtcgtccggccggctcatttccaggactggatagctcagtccgttcggtaggctgggccatgtctgtcggatgatggtagacgcttcgaaacgggcggcatcgatattggtatgcttgtccagctcgagcgtgacatatccccatccgttgccggaagtggaattgatctccttgatccccttgatgcgtgccaacatcgcttcgagccgcgaggtcacttccatctctatcacgcgtgccgaattgcccggcatgttatagctgatagtcaactgtggcagcgtgcgtgacggcgacagcttgatcggcagcagcggtataaaggcaatccctgccagtgccacgcaaaggaaggtgacgatgatggtgaaagaggatattttaggagatgcactcattattcattttttgttacaatccgtatttatattcgaactcgttcgaaagggaaactcccgtttcgaaatcgtgcaacgtcagttttcggatcttataatagctcagccagtagttctgtaaagccgaaatatagttccgctgcgcttcctgttggcggttcagcgacagagtaagactgttgatatccgcttttccgatcatgaagcgttgcttggtttcgctgtaggctgtttctgccaggtctaccgcttcttcggcactcccaatcagggcttgctggatattgaagtcgccgactgtcataatcacgtcttcttctactgtcaattctttttgtttggcggatgtttcggtgacaagcaggttgttcttggcaatattatgcttcccttttcgtacgccccagtctaccaacgggatcgaaacagacaaagagacgatttcctgctgttgcagatttttgtaggcgtcctgtatgttcttggacacttggttgaatccgacgctggcattgatctgggcgttgaacatcgcttctttcttggttttgtctacctgctgctgggcttctaatatttgctggcgcaactccagaaaggtcgggttgtttgcacgtgccaattcgagtgctttgtcgaccgagatttccatattgcgcgggcggcttgggaggcgcaggcgtatttctgtattcttgtcgaagttcaagtaagaggcgaggctgaacatggcacgttttagggcgatttccgcatttttcaatgtgttgcgtgcgtttacggcatccaatttcagtgtcagcaaatccgcttggctgatagaagctatcttatgccgttcctgccctgtccggtacagtgtgtcggtcgtggcgacattttccttggccagatcatattccacctgtgccattgccagagcgaagaaataggtcgttgcttgctcgctcatttgctctacattatataatagttctttcttgaccttctcgtatttcaacggttcgattttccgttcccatttaaaagcgttataccccaataagtcttgctggtagccgaggcggatcggaaccgatgagaactggttataagtttggtcgccgaaatagcgcatataatccaagtctgtatccaaatagaatgtaccgcctaagaggtcgaaattctgttcgatctccaattgcccgcccgcataaaacgattgttgttttctatatacgtcgatatcagcctccgagtcatatcgttgggtaaaataacggcggtattgtgccggcgtcagatttagggtaaggcttggcagacggccggccttgtaagtccggtattcccagtaaccggccagatacatatttttgtatcggaaagcgtccagtgaactgtcggccgccagtgtgatagttcgttccagcgtcagtgtgagctgcgcttttcctccgaacacgcatgcaagcatcaacaacgtgatgacatatctataaatgaatttcctgtccataacttccaattttcaattttcaacattcaaattaccaacctcatgtttgcgataaatgaaccagtatatcagtggtatgacaaaaaggctgactgccgtaccgatcagcatggccgagatcatggcgatggagagcggcttttgcagttcgctgcccatatcgaatgtgaaaagcagcggaaccattccgaatattgtcgttaatgatgtcatgatgatagggcgcaggcgccgccgtccggcttcatgtatggcttccataagaggaaccccttctttgcggagttcgttgatagcatccagtttcaggatggagtcgttgatgatgataccgcaggtcacgacgataccgatggcactcatcaggttcatggtatggccgcatatccagagcaccagcaaggaggctgccacatcgatcggaatttcaagcagcacgatgagcggctgcaggaaactttcaaactgggctgccaggatgaaatacatcagcaggatcgaaatgaacaaaatcacgaccagctcgttcagcatctgccggttggaaaagaaacttcctgaaaaatcgatatcccagtctgtatcgatttctttttttacattttccatcaactgttcggcattgtctatatcatagaaactgaatggaatgtattctccgttctttcctgctgtgatcgttttcaagtcctctcccggagtgacacgcaccagcgattgcagcgggatatatcgtacgttgccttccgtatcaggaacagtgtttaccaatgttttctgcaagacctcatttaccgtttgttcctctccggccaatgtaatcggcaaatattgttggtaggagcggagcgttgctacttcattctctttgaatgccgttttcagcaaccggtacacttcgttgtagtcgacgttataaagcagaagtttctgtctgtctattgtgatatttaactggttgtcgaaggtgataccgacaggagtatgtcctgttttcgcctcgatttgctgttctattttattcaagacggaggcttccggtgcttcagatttattgcgggtgtgcaattcggcgacaatgtcggcttcacctgtcacaaacagcttttcaaatactgtttcgggaggcgagaaggatatcactgccatcgggtaatgcgttttgatccatttttccaccgatttttgcaaaggagcgattccggttggtttctccgtcttaaaatataactcgctttcagaaaccgacatctcgcgatcccggttcaacaggaattgctgctgcccgacataggccgtgtgttcttgtacctgattgtcgatagaggcgaataactggctgacacggctctggttttcatcgatatggatgttttcgttccattccacatgagcgatcagttcgttctggtctatctccggcatacggcttttcggtatttcgtagaacaaaaaggcgcaaagtgggagcgtaatggcaatgaaaatcaggcttgccgttttgtgacggaacacaaaatccactccggtatcatagaagcggtccaatgtatgctcttttaccagattgttgattcgcatattgaaacccttatgtttgatgtccggaatactgtataccagtttgtagagtaccggcagcagcatgattcccgtgaaataggaaaccatcagaccgacggtgacggcaaaggcttggtcgaagaagatcgctcctgctattccgctcatgaacacaagcggaacgaagacggcaattgtcgtaaaagtggaactcagcatcggagtaattacttcggtcgtccctttattgcaagcctcttccagcgagtctcctcgtgtcctgtattgggtaatgttttccgttacgatgatcgaactgtcgatcatcatacccaaagccaggatcaacccggagatggagatgatattcagcgacatcttgcagaggtagaaaaaaaggaaactgatgatcaggctcaccaccatacttaacccgattactgccgggctcttgatatcccctaagaaaaggatggcgacgatacagatgaaaaggaaacccaacgacaggttttgtttcaggttcgagatggtataatccagcaattccgtctggttgcggctgacactgaaatcgatatccggatagacggaagcaaagtaatccgtcacttctgccaatgcctctttcatgttatccatattttcatccgcctgcttgattacagccagcgttaccgcccgtttcccgttggaaagggaagctccggtctctttctccggcacgacggagatgcgtgccaaatctttcagttgaaaaatatggttatttttcctgatataaatattctcgacatcttccggtgtgcgcagcagtgtcgagaacttgatattgtactcgtaatagccgtcacgtacggtcatgctacccggttctatattgttagatgtcagtgcggcttccagatcgtcaagtgtgatctccgacattttcagcaacttcatgtccggaacaatctgtaactgccgtttcagaattccggtcacatctaccattgccacttcgggcaactgttcgatacgacgtttgatcaccgtttcggcaaactggcaaaggtcgaggaacgatccttcgtttatttcactgtaagcgctgtcgcttttcaatgtcagattcaagcagaatacgggaatatcagtggcactggctttgattacccgtgggcgttctacttcacgtggcaggtagttcatagctgcgtctatcttttcgttgacttcgataaaagccagatccgtattcgttccgaaatcaaagtttaggcgtatgatggcagcaccgtcgcgtgtttcactgtggatgtcgcgtaaactggcaacctgcattaattgctggcggatggtttttactactgtgttttccaattcgcgtgccgaagtgttctggccggatacctgtacggtgatctccggaattgcaatatcaggcagcaacgacaccggaatggtgaagtaagtaaccagtcccacgataaagcaagccgtaaaagccatcaataccgcgatagggcgttgtagtagaaactttatcatgtattagaactatgatttatgatttataaattatgatttctgaattgtcaattgtccattttcaattgtccattactttgaccggtgcttcgtgagccaggttaatgttaccgcttgtaatcacgatatccccttctttcagtccgtcaatgatcgtatagctgtcggcattttccaaacctgtatgtacatagttccagtatgctttgtcttccgttaatgtgaatacaacctgtttgccggaacggagtacgacagcgcttttgggaacgaccaactgtttacccagcgaacgatggatacttactcgtacattcatcccttcgaacaacttacctttatcgtttacggcagctttcacctgtaccatcccgtctttgtctaccagcgggtttatttcggatatacggccgtcagccgtgacatcggacaaggcaaaaggagctacctctacacgatcgcctgttttgataagcggcagttcgctttccaaaactgtgaaagcggcttccaatgtgcgggtatcgataatggaacagaaaacatcggaggtagaagccgtattgaactgtttggcgaacaggttagcgacgacaccgtcgaaaggggcggtcaggactgcgtttcgttgttcgtattcggcaagctgccaagagatcagtgcctggtcatacccgctttttaccttgactaactgcatggttgcgggcggtacttttgtagaatcttccagtttgtagccctgtccgatcagtacgtcttgcagttccagtttggcgcgttcgagtgcatctttggcttgcgctgtcttgttggcaaggcggaagatagagagttctgcgagcttttgccctttcgtcacgcgatcgccgttcttcacatatatcttggcgatcggttctgccgattcgaattttaggtcgacaaagtttcgggctgacagtttgccgttactgatcagttcgtggttgaaatcagtagtattcaacttcatcaccgtcacctcgtttgtctcatccggcagaacggtttctacgctttcttcggaacctttctctttcttttcaccggagcaagccatcatcccggccagaatcagtatagcaaacaatttgtagtatttcatattttattgtttttatcaaagttgtttcgcaaatatacaaacatattttagttacgagcctttcgtaattactttttttctattatcttttttacttcttccctcatttcccggattgccgtactttccaccttcggctttttggccagcacgacactggcggcagcccgcaatttatccgcctggtagaactccggctctgcatatagcttggctaacaaataatatggatacaatctctccggcagtatcccgatagcctgaagcaattcttcttccgcctcccggtaatctccgagcgtctgccggtttttggcgatcatgtaccggatcatcgggtctccgctcagccgcttcgcccgttccagcacccgtatcgcttcggcgtgttgtcccgtcttgctgaggcattgcgcctcttcgaacaagaattccggtttatgcttcaacttgtcatgcagctcgtgataatcttccgcaaccgattcatacgccttgttgttgtagatcatctgcatccgtccccatcgtttatatgcctcatattgccctttctgcaagatgaacagacagacggaggcaagcgacaacagacttatcatcgtaatatggcacaccggtgatacggatagggcagatgatcttgtccgcgtcccatcttccgtcacgcatatcgcccccaaaaacaccaacgccacccaaaacgacggcaactgcaacggataggacgacaccgcgaacaccgctaacgccaacacgccaccggccgctccctgctgcctgttccggattccatagtacgccatgttccccagccacgccacgaacacgatcaaccctccgactccctgttccagtccgatctgcaggtattcgttgaacgcatattcgggacatcccgccacccgtttctcccggtctgttacgttccctgttgcgaaatacccgccttgcgcctccgcgtatgccgccgggaatccgcctaaccccgttcctgcaagcggctgtccggcaatcgctttccccgtcactttccacatcagcaatcgcccgtccgccgaatcttgtttcatcccgtaaaccccggcaatggtacatcccaccaatatcgccacaattgcaataaaaggaattgtagcattcttataccttcgacatacagctttcgtcttctcccatccgatccgttccgtccagtacacccatccgcaagccacgaccgccgccatccacgccgaccgactcattccggcaggcaggacaatcaggatagctccggcgcatacccaaccgaaataatgcatccccttttgaaaccgcaacgccgtccacaggcaaaccggcagcacgaccgctaagtacccgcagtaaggccccggattaaagaaagaacccgtcagccggaaaagcgaatggttggaataggcatagccatgcaattgctgcattccccagacggcttcgaccagtccggtgagcatcagcacaaataagaaaaagaacttcaggcaaggagcctctgtaagaaaatagcgcaacagaaaccacaacacgaccaactgcccgccgaaaagcagtttttcgggttcgggatcgagctgccagtcgtatgtcgcgagcgtgatcccggcaaagaggagcaacaatccgtccggcaatgcaaacgggatgcttttcctcccgccaagccatgccgtcacaaccgtcccgatcgccatcagcgccatcgacaggtggaaccagaagacttttcccgtcacaatgccgttcgccaatgcgctgtcgccgacgagcggcgtggcgatcagcatcgccccgaaaacggatgccagtgtagtctggattccatgcctatgcaatttgagttccatgccggtgtattttatttccatgcttatccatttttattcgattttcttcatgaaccgatcccagcggaactgcccggtgtacggatcgaccgatttccagacaaatgccgccttgccgacgatatattcttccggcaacaagccccaatagcgcgagtcctgcgagttcaggcctttgtcacccgccatgaaataatagtttttcaagaagcggtattcccgtatcggttcgccgttcaggaaaacggttgaatcattatagttgatttccgctttttgttcccatgcgatcagcttgcggtataacagataattttcccggttcatttcgaccttgtcaccggctttcgggacatagagcggtccgaaattccggatgttccaactgatgacggagtcgaacgggaatgccttatagacaccgtccggaaactctcccggcaacgtccgcccgatgcgttcctgcgaatccatgtttccgagcggttcgttcgtgccgtttatccggaaccttccgttccggatggaaagcgtgtcgcccggcaatccgatacaccgtttgatgtagtatttcaggatatgcatctcgatcttgtcccagccgttgggatgcgggaagttgaagaccagcacgtcgccccgctttgttttccgaaatcccggtgtgcggtgtatctcggtctgttccagccgcagcgtcgcgttgaggtcgaacagccgtgcgccgagcgtcggtttccagaccgccacgaaatccccttcgaccagttccggctccatcgagtcgctggggatgcggaaggaggcgaggaggaagacttgagagaagagccaaaaggcgatcagaaccaccaaagcgagaaatagattcaataatatgttaatccatcgtttcacaatctatcttttagattaaaaaatatatcattttatattcaggttgctacaatcaataccagtcaattttattatcttcatcacaaacgaatattctttgttgctttccctgcgagcatttaatggccaaaagggctttttgaggcacattttcaaattcgataaaaacatcattcgctattttggtattgataagttgccaattattattatcccaataatataaagaatactccaatcctggctgaatagaatttccatcacaacgacgaatatacgaaattttggatatatttactggccggcaaaaatcaaaaccgacccaatcttctcctttggcactgaaatttgtcaattgatcaccatctgctatattagctgcgttgttgcttttatcaaaaatcgaatttgtacatttgataatgttgccttgaatgatcgaatcatgttcatcatagaaataaatttcagccatgtcacactgacttgtatcagaagatgtaaaacgccaatatcgatattcggcatttttatcaagaaacactgtgccatttgttaaattcccttgaggtaattccgctattttctttgtatgatcaaattccctgttttcagaagtttcgataatacctcctgttattttttttctaatagaaaatacattgtctcccaaaggatattttcgattcaatctgatcgtacgaaaagctgaagtgtctggttctataaattggatatgcttcgaagcagaagccaaaaacggtttgctgatcggaatagcattgccattagagtcatacgccaaggcgatataacaggtattcagtcccattctttcgaaaaccacatgactaccagctattttcccccaatagacaggagtccaattatttccatcatagatggctataaatggagattgtccactcttcaatgattcctgcaacgaaatacgtatgtcaatcgtaggcatatattcagcggtaacatctcgtataaacatattcctgagtttgagtgggatatatttctcagttgcgattttcagatactcttcattgggtttgtacacattgcggaaaatcttagggactttcaaatatggataatgaactgtgcccggatctgtcgtatggggcgcaaactccaagtttccaaaacgcgttgtataaactgtattccaagaatgtccattattacctgtagaccaattgggcgtaaaatcataagcgacaggaattcctttactacgcatgattaagacagcccctaaacaatacgtggcacaattagaaaaaggaagtttcagtatgatatcaggatcataaatcggaagtgtctttaataatccaaaactttgaggtgtgtttttcatttggttattcacttctgttgctgcaaaaattggatttcgtttatactcgtcacacaaatatgccagatcaatatctcctttacaaatatcgtaataggcattcctccattcggtaagcggctgcccttcaaaacatttataaggtaatagatattcacaaaattgttcgaaatccagatgttcggcccattcgcattctctccattgtttgaaagcttcatcgattgactgaataagaaactccgaagtgataacctctatatcccgtttctgtttatatttactttcaaatctaagacgaagcgattcgatatgtttttcttgttcaagtttgtcttctgataaagcaacgacagaatcaatggcgtgataatagtcctcaatgcctttatcataagaagtatggtaaggcatgtatcgaatcaggtattgggctgcttccagtttctgccgatcatccagttttgcgtagtgcgacaaaaccgcttcaagctcccctctgttttctccggcttcccgcagagcgtattccacatcggttatttgtaagccgcaagcaaaaagcatcaagtagaaaggcaacgaaaaaaacagatattttgtagttgttttatattgcaatctcatattcattgttttaggggagaaactatatttcaatcattctttatcatgacaggatgaaagatatgcacttctaaatcttcggaaatctcttgatctgtaattttatctacaaaaaaaaggattccatcatgaatctgacaccagcctgtataaggattgaatgtgtttatgggcagtttgatttcttttattttattaagctcattatcaaacagacataaataaaaatcccgttctctggataataattccaggttttcgtttttaccgaaatcaatggcatccacatgcaaacgggcatacatatcacatgtcggaagatacatgatatcaaaaaaatgaggattttcaaatccgtgtctttgccattctgtataatctgttttggatttacacttttgagctttattggaagtgtaatcgctatcagctttgtacatttttccagatcctgtgttcaaatcgatcttgtagagatgtgattctatcggataattatataaaatgtaatcatcccgaaagttgacattcggttcactcatgttcgcataccctttgcttatgtctggttccgcaatagatggagataaattgaaagtttttaccttttggttttcttcgaggaaaatttcttttactttgaatcggggtggcgaaacagacctatcttttaccgtgcatagcagcgactggtgcagggcattgtaatacaaacgaattgtagacatagcatgattcgtatttatgatcaattcctcgtcttcttgcaaagaattacggatttgaatacgtttcaacacattccctttcggatcaatcaggaatacggattccgattcatcagcaacccaaatggagtctttttgatatgcaaaaattccagttaaacgagttatggcgttaggaccacttgtttgtaacggaatttgaatgatttttttctccagaagattgatacaatccaaagcatgttccttatggttatatccaatcaatatatgtttagcacctacttgtactgaagaagacaaataataggactttagttgtaatacgtcagaaggagggaaaaaaagttcctccttctgtatttcaactaagtcattatcaacggtctttatattttctcttctctgagagcaagatatactaatgcaaattatgcataaataatgaaatagtaatttgtacatggttatctacaatacgttggaccataacattcaggacgttcactgtctttaaaacggcattcatttccggaacttgatggacatggaaacaaatgatagtttgatttattctcatcccaagctaaagcctcgacattttccaatgccaagtcagagagttgaacctcatttttgttttgctggtagttccagcctgctgctgcggcgatcgctgcaaaagcgattacgccgatgattttctttcccatgtttctctttaattataattgatattctatcacatgaaattcaggattatcacttaatccatacaatttatttgtcgtaggattgattgtaaaggtgaaaataggcgaatccaatgtatatcgttgtagaggatttcctttatcgtcaaatacaaaaagttgatcttttagatatttgtggttttcacgattaaaatagatcccagagtataaaacatatactctcccatttatggataaaggtgaaaaatatgcatctcgtgattgccctgaaacagaattaacatgaactgattcatcttgaatagtctgtttgattactggaaaaaacaaatcaggaccttgtattcttttttttaaattgccatatatatcatatagctctattaaatctgtttgtttataaaaaaggaagatcccatttttatccggagacagggtagcataacaggaaagtccttctattttttcaaaaggggtcaatatctctccatattccgggtattcaccttttgtttctataaatttgccttctgagtcgtagaatgataaacgcttttgagtactattataagctgttgtcataaaatggtgattgggtaaaataacgatatttccaaaaagatcaggcagcataacttcttttattgctgttggtgatatagtatctgaaaataagatgtcttttttacgataagcagatatgaatggtctttgtgcatctgatagccataataggctgtcagatgattgtatttgttgtatatgaagaaattctccagggccatttccaaaagaaatagatgtgttaactttctctcctgtattaacattatacatatgcaatatatgttcatccatatcttcttttagaataaggattgaatcttctatatgtaatgctgtcggacgcattacctctttagaaaattgaagatcagtgcctttaatctcgcctttatccaagaaatctgtcaatttgaaagatatgcaattctcataaactcctttgttgttacaagaacaaaatgtaataaaaatacatatactgataaattttgcaattttcataacctttattttttaattggctatataatatactattatgtaacgatttaactttgacgtgatgagatctttttcattcggatccaatttcccgtcatgcaaaaaggattttaatgttttttgtttgatcctatcttctatatcagcctcatatatgatcaataacggaatctctttattgtaaatcatctctttggtatagtcgaaaaacttatagtcgaaatatttgttcaaatcagttgttactttttctcgaagagacatggagccagatctataaaaagagaaaattttcacatgtcgacaatttgatgtatccggagtcaagatccaagacacagtacttccttttttcggataagcaaattcagtcagttcaaattcatctggtatatgtttttgatccacgtattcctttgtgtagattttgtagttggttttttctttagtcgctttattactgatagttctactttcactattgaaagacggactatctacgaactttccattgttaggggttgtcgtacggcgaacacctttggatggaaatagattttgcccccatgtgacgaagggaaacaataataatatgatgattaatttcatggtatatttattttagaaagtgctgaagaggctccttcagtcactttctttattcgacacgttttatcctctcatgtttggacaaacttttattaaatttccccaaatggatgaatatacattacaggtactactaaaatcaacaatacaaccataataagtacaatttccccaatctgtttcgccttgggctaacgcttccgcattagctaatgctaaatctgacagcggcacttcatttctactctgattgtaattccagccggcagccactgctattgctactaaaagtgctgctccaagtatacgctttttcattttcgtattttgttttatcgtttttgattcagtaaattccctatctttgttcattcttttaaagcaacaagatagccaaatgatgtactgaacttgcatcattctgttttgtccggtttatattaccatcatacacctcctttctaaggggtttcggggagcttgccgtcgtagtttctgaggcttttcaggcaggctccctttcgttcaattactgaacttggcctcttatttttactttgacaggacttgctgtgttacatttaagtgtgacgatttcatcgaaaaagcctgtgtctttcggtgtcatcctgacttcaatacgaagccgctctcccggcttcgctgggcgtttgtcatagtttgcagtcgtacaaccgcaagtggtactgatatccaatatgacaaggggattgtctcccgtgttttctatttcaaaaacagccgttttctcttcggatttcgaaaatgcgccgaagtctacttcgctgtttatggcttttgccgtcgttttgatccggtcgcgccccggtgatattttcccggtcatctgtttcaaatacaaatccttgacctccaagttatgcaccggattgccgatcactttcaccttgttgtcccggtcaagcaggaaggtttggaatgtgatgtcttgcggaaatttgttcaatttgtccaactgactgtcccggtcgatacagaccggacggttaaagttgtcgcgtttcaggatatatcgcaattctttatcatctttcgactggaagacgaaaatgaacgggatgttgctgtttgttgccgaatcgacatgggcgatcaattctttccatttcggcagttgcaatttgcaactggtgcaacctgttgaatcgacataaatcagcactttatattccgcatcgggtatccggtattccacctgctcagtgacgaaacgggtgaaagccatatcctgcggaaacacgatctcttttccctgccattcctgaaccagacgggcaaattgatctttcttgtcttctttgcaagaggttaacaaaaagaatatagataatatgtataacagtggtttcatctattgttatattttaaattccatgatcggctcgtcgctttctacacatgtggcgatgaccgtctttgttttttcgtttatatcgattctgtatatgggtttgtctaaggtgtatttttgtatgggatttcctttcaggtcgaatacatatatataacgccctccgtcttccggcttttcgccccattgataagaggctaatttgtctttaaaccggattccttggaatacgctatagatatatttgtctgtgataacaatatcgctgaatcccataattccggtcgggaagccttcacctttgatgcttttaaaccggggttcgccgttcggaccgtataatacggtatgggtattctctttggtattgtatatttcgatggattcccctaattgggtgaccattgccaatatgccattgtgcgggttgtaatcgataaaactacgccatgcctgtgctaatgccgggcggatttccgaagccaaatctttttcggtaggtattttaccgatgcttctgataggtttaccattgtaattgacttgccaatatcggtgctctcctaaatagtccgggatcagaaaacaagagtctgtggcacagaaatccaatgaacggattagatttttatctaatcgtatcacttcctgtcttgtagctgaatggtcttttgctgaaatcgcccagcgtgagatctgcatcttgtttgcatcgagtgcatatatggaatcgagggagttgaactggaatgtttcggccgaaagcatttcttccggtccttcaccccgtttgccaaaagaaacaatatgtttccaattcggatatgtgaaagcatgaaaataattgtctgcgttatgcaaatccattacaatagctatactgtctttgaccgctacccggaatgggtagcggaagagggcagtgtccagttcgatcacccgcgcacttattgccttttcattgggaaaagtcgaatatcggggatagtaagtaccgggggaatcggtacaggagattattgcactgatacctattgataatatgtatgcaaaacgtttcacgattattatttaatctaaactgaagtctgtgactttgtattttactttataagttctgcaatcgacagagccgtatcctacacaaattgcattatcatcgttttctccacttgctaatgcttcaacattctgaaatgccagactgtccaatgtgcttgtttcattattgtaaaacaggctgcacacagccaccaaacaacttgcaataaaaagcaattttaatactgttttctttttcatgttcctttttttaagcgtaaaagtaatcttccgatttaagattgtcaactaaaagtggaaacactttgctgtttccggtgaaatgttgccaaagtgttgattttgcttgttcgttttgttacttttgtctcacaaatgagatgaaaatggaaaaacatagatttattatagtctttggagggatatcgattttaacgatattggtcgtgtttttatcttgttgttacttttctcaaattaaaaatgagcagattcttaaagcaacttatctttttagtcatgcagtcgatctggaaaaggaactgatgcaaccggagtttatctctttcccaagatctgataccggcatttcttctgattctactgttatcgagaccgaaaagggaaaagttgtttataaaaaaaataagcaggtggatagtcttgctttgatcgataaaagagaatggttttttcagatgttcatttcattcgaaaatcccaatcgtgcctttaccctcgacagtctttttcaagaagaactgaaaagtgaaggcataatggcccggactgccgtttcttttttacagggcgacagccttgtcagttgttcgaataaactgttatctcaggcagggatcgctttagaacccattgtctttggcgtagaacaggatcaaaggcaaatagaactacaagcgtatgtcctgttcccccattcctatttatttagccggatgcctttgatttgggggctgattttgttgtggtgcattcttgttattataatgtatatatggcaacggcgcaaaaaggtggagtataataaagcggctgttgctcctgttacgcccgtaccggcagcgctttcttcggatgcttcggagtggatagagatagcgcaggatgtttttttctgcaagaaaacgggagaattgaaagatcgggatcatgaagtttttttggcaagaaaccgtttatgtgcttttatccgctttttggaagcgccggatcatactgtcagctatcctgttttttgtaatgatgtgttagggcggcctttgagcgaagatgaatcgacagaagaaaataggcagcaaaaccgagcgataaagaaatctatgacgcaaaccataatgcgcctgcgagaggatttgacgacttttccggagttgtctatcgaaaatgtttccggtttatcttatcgcctgaatattggaactgtccgggagagcaacatcgggctggaggatacccgtagtaggtcacgcggatcataaccggggcgttcttcaaaatttggcatattcctgccattttcaggacaaccgcatcaaaattttccagggttgtgatctacatatgaagttttctgcaaatcctctatcactccatcactccaaaggttgtagctattaatattcaagcgtcagagacagtgatacaagacgttttcctctatcactcctctatcacttctggaacatgttttttttcgaataaacaaatgtaaaaatgaatataacaggtattaaatcggcgaaatacggttcttcattccacaaaagccctctctttttttgccaaagacaagcacataattccgtaaacacccccatgttgccatccttaacacccgggtgtaccgactctctacacccgggtgttaaggatggcaacatgggggtgtccggcaactaaagtaccgtgctagacaatgaaaaccacccggttttacctattttgcacttgtttttacataaaataatcgcgtgatttacagggatgagaaaaactgctattgccagtgatagggtagtgatagagaaaacgggcatgtatcacaaatcagacaatttgaatatcaactgatagaaagaaatcagtgatacagtgacagaggaaatgggaaaaacttataagataaggtcctattttttctttggtatatttcatacacaatagttcgttaaaaattcgccaatcctaagcggctctggcagtaaataaaatgagttctttgaaaagtttgtcaataacttgcatgtctgggttaatcccaaacacgcaaataaatcgtgagtgctgataaaaagcacttggaacaaatcgtgatccgattgcgaaaaggcttgaaggatatctttcttccggctttccaaattatactggaaacagacttgttcaaagttggctgacagaatgtgaatctactctttttatctatctgaattgtgtattcagtccgtaatataacaaagatagtaaagtttctttgcatagccaagactgtcggactgatatagtctaaattatcccttctaaatccaaataagcgaactgtatttcatcgtttaagtttatgataagccggttattttctttgtcataacagaaatcggttatcatgtatccggtttccagggttttgaggtaattgccatttaaatcgaagaccaggaactttgttggatagtaggcgtctgtgcggtgatcgccaccggaataaagggccagaatcttatctccacaaaattcaactccgagagaatagtgctgggtttgtgttttttcgtttacccatttcggaccgtagatattacattttaaattcccgttaaaatcacagatggtcatcaggtcgtattgagtataacattggacatataattggtgctctgcggatgcagcgtatatgaagcggacttttttcaaatcgggatattcgtatggcataggatttatttccccggttgccatattccatctggcaaccgaaggtttataatcgttgttacctatcggttcgatgattttggcaatgcaaagtgtgtcattcaaatataaataatcatccggaaacagttttttcttcatatctatttttacacttggctgatattccggagtcgttaaaacactgtccaggtcgtaagcgaatattttcagtttgccgtgatccgatacaaagaagcggcggttcgtctcgtcgattccaacatggcctataattgtaatctcacccggaccttgtccctgatatgtactgctggcaagatgttcgaatgtgtttttgtcaaacagatgaatgagtttgtccggtgaattataatcggtgacaatcaaataattgtcgattagataagtcctcgatatccggcctatcagcacatcttgtgttgaaaactctttcattttgtcccgtacgtcgaccacctgatcccgtttactctggtgtttttctgtttcagaatcctgactgcaactccaacagacagcgatcaataaaaggtataacaatttattcatgactttatttgcttttaatatgttgtcacgatacaaatatacgaatattatttaattacgatatgatcgtaacggctttgtccgaattattgatagacatgaactatatttttgtttttcatatcttcatgatgagatattggatcagccggaggcataaagattcggaatctgtcaaaataattgctatctttgtcgccatttgatattaataatttaagaaagaaaatggaaacagtagtaagtggcattcgcccaacgggtaatttgcatctggggaattacttcggagcagtaaaaggatttttgcaaatgcaaaatgagtataattgctttttctttattgcagactggcactcgttgactacacatccgcatcctgataatatccgtaacagtgtaaagacgatcctggccgaatatctggcttgtggcatcgatccggaaaaagcgaccatctatcttcagagcgatgtgcgcgaaattcccgaattgtatctgtatctgaatatgaatgcagggatcggcgagttgatgcgtactacttctttcaaggataaggcacgccagcagttgcacatcgaccgtgtcaacaccacggaaggggatgtggaaaaggaaattttcaacgaaggcaataaacatagcgtaagcgccggtttgctgacctacccgactctgatggctgccgatatcattattcataaggcggtgaaagtaccggtagggaaagaccaggaacaaaatatggaaatggcgcgccgttttgcccgtcgtttcaatgcaacttacggagtcgaatgtttcccggaacccgcctctttctattattccaataaggcgatcaaagttcccggactggacggatccggcaagatggggaagagcgaaggtaatgctatctacctgatcgacgatgaaaagacaatcaagaagaaggtgatgaaagctgtgacagatgcaggtccgacggaaccgaacagcgtgaaacccgaaccgattgccaatctgtttacgatgatggagatcgtatcgacaaaagatactttcgatttcttcaatgagaaatataacaattgcgagatccgttacggagatttgaaaaagcagttggctgaagatatcaataatttctgtgctccgattcgtgaacgtatcttggacattcgttccaacgaagactatttggcaaaagtagcccgcatgggagccgaaaaagcaagcgagagcgctgcgaaaacgttgcgtgaagtgcgtgagattatcggattcagaggataagcatattcaggcttactatatttgaggcacggattgcaccgacctcacggatgaattaaaaccgtgtagtctgtgtagtccgtgttttgtttatgtttgcaaggcaggtgattttgtgcggtataatttattaaaatcataataaagaacctgaaaatcggattattaaatggaaaactactttactttgcagtgaatagagacaagtaacaaatgtatggcggcaatatctgcgggtgaatttgaacgtattttcaaggagttttataagcccttgtgcctgtttgcactccgttttacagaaaaaacggaagatgccgaggacgtcgtgcagcaggtttttgccgatgtttgggataagaacagccatgatatggtaattgctaactttaaatcctatctctatcaggcggtacggaaccgttcccttacgcttatcgcccagtcttccgatatgttacagacaacggaatgtattgctgatatagaagacctgtcggaagaggaacagatatatcaatcggaacgggatgcgcgtctttgggcggctatcgacggattgcctgctgaacggaagaaaatatttctgctttccaagcgggacggattgaaatatcaggagattgcggaggagttgcatatttccattaaaacagttgaaaaccagatgggaaaagcattaaagactttgcgggaaactgccatacggatttattgtttctttttttcttgaatgaataggggttttttcagatttccggtcttagtgatagaaaggttaaatgtttatgtatcactaatacaaaaaagaaaaatgaagaaattcgtgttatttgtgatgttgatgatgagtgtggtatcggtgagcgcacaacgatggtcgttgacgccggaagtcgggatgacggccgtcaagagaggcggcttttcttatatcgatgaaccgggatacacttggaatgcccgttggaaaatcggagttggagtggagtatgttgttaaaccggaccgtttttcattgaaatcggggttgtattatgctcaacggggatattcgagacaatcgacttcgttcgggaacatttacccgacaatagacgatcagtcggagtctacttttagtaaaagctattataagacgaggcgtcatttcttgcaagtcccgttgatggcgaatttgtcattccgtttagcggataatgtacggttgaatctggctgccggtccttatatcgcttattcgatgggagataaaaatatagctgtgtataatgaatatacaccgggtaatagtagcagtcatgaaagttatggctctatctattatggaggtaatggaggttatttgtatggtggcggatgggtagagaaaggttttagtcatgaaagttggacgcacgataactctttcgactggggactttcgtttcaggcaggattggaaataggctcctgtgtgatgaatgtcggttacgatgcctctttgggcaaggaatacgaatatgattcggtcgacttgaaataccatactttcagtttatctgtcggttataaatttaaattaggaaaataaacaatggaaagggctgtgtccattgtccattatcaattgtcaattgaaatgaagaacaacgagcgagatgatagatttgaaaaacgccttcgttttgtagtccggcactacaaagagaggagcttggatgaggataaggcttggaaacggtttgcctttcggcagggaatccgccggcaagtcgcttttcgccgttattggatggcggccgcttctgttgtgcttttgcttattggattcggcactttttatgtgaaagagcggaataatcccgaatgggtatctgtcgctactgtatcggggcaattaaaagatgtttatttgccggatagcacgctggtttctatggccggaaattcgacacttcggtatgatgtgaagaaatatggaaaggaaagacgtgtggtggagatgacaggaaaagcttttttccaggtgaagaggaacgaggcgcgccccttttccgttcatactgctatgacggaggtgacggttttaggtaccagcttccaagttagtgaacaaccggacatgacggaagtcgatgtcgttacgggaaaagtgcgttttgcagcagggaaggagcccgaaccggttatcctgacagcgggaatgtcggcctcttattcgaatgaaaagaaagaaatagatatcctgaaggaagagaatccgaataatctttcctggaaaacgaagcagctgaggtttaacgatacgcctttggagaaggtgatcagggacctgaacgagtattaccaggtggagatcatcaacaaagtggattcgccggattcccgactgaccgcaacattcaacgatctgcctcttgacgaagtcctgatggttatcaatcagacgttggatatccgattggttccccggaaagataaataaaaaatatgtatcgtgtttacctatttgtcatcgggatttgtatatgttgcccgctgatcggagcgaaagaacctttgcacttgttggcggacccgactcctactgtcacgctggatatgaagcgggtgcccttacaggatattttgctggagatcgaaaagcagaccggcctgtttttttcctatgaatcgtcgatgttgaaagaattccgccatgtttcgttgacggcgcgcgacgagtctctttcttattgcctgaaacggttgttcgagcctttacctcttgtttaccggattacgggacgttatgtgatattgaaacggaaaccccggcaatataccatcagtgggtttgtgcgggattccgcatcctacgagagtctgattgcggcaaccgtggtggagcgttcttccggaaaaggatcggtttccaataattacggcttttacagtattacgctacctccggggaaagtggtgctgtcttcttcttatgtcggctacgagccctgttccgttacgttcgagttgacccgcgacacgatgatcgatctctccctatcgcctgccggggtactgggggaagtcgtgataaaaggaatttctccccggtcggatgttttgaacagtcgggtaggggtgtcggatgtcccggcaagccgggtgaaatcgttgccggccctgttgggcgaaacggatgttgtcaagactttgcagcggctaccgggtgtgaccggaggaacagaaggcatgagtggcttgtttgtgcggggaggtgatggcgacgataacctgtttttgcttgatggaaatccggtctatcatacagaccatgtgttaggcttcttttcggctttcaatccggatgctgtgaagaatgccactttttataaaggaagttttccggcggaatacggcgggagactttcttctgttgtagatgtgcgtacaaacgaaggaaaccggaaagaatatcacgggaatatctcgatcggcttgctggcggcgcgtgccaatctcgaagggccgatcatcaaggatcggtcttcgttcaacgtgtcggtacggcgtacttggatggaattgattacctggccactcatgacggcagtgaacaagaaggccgatactgaatggaagggcggataccatttctacgatatgaatgctaaagtcgattattcttttacggaccgtagccgtgcttatctgagtttttacatgggaagtgacagttatcgtaacggtgaggattcgaaagatatacatggtgaagatcgggacttccgctggcgctggggaaatctgatcgggtctgccgggtggaactacctgatcaaccggaaactgtttgccacttttaccggagggtatacccgctaccgttcgcatataatccagaagcagaatgcttttgtctcatcgccggataagagcggacaggtctattttcaggaagggcattatcgttcggctatggaagatgtgagtctgagagcctcttttgactatcgcccgaatgtcgaccaccgggttcggatgggaggcgattacctgttccatctttttcgtcccgaacaaagtaatatgagttcctggtataaggattcggttgtttcgcaaatgaataatacggtcttttcacattctttgattcatggccacgaagtttccctgtatgcggaagacgaaatgttgctgaccgaccggttgcgggtgaatgccgggttgcgctttacccttttccatgtacaaggagagacataccagtcattccagccccgtttttccgcccgctatctgttagggcggaacctgtcggcaaaagtgtcctatacgaagatgaaccaatatatccatttattgtccaacagctatatcagccagccgacggatatctgggtgccggttaccgggaatatccgtccgatgcatgcgcatcaggtaacgggtggcctattttggcattataaagaattggatttctcggctgaaggctattacaaacggatgaataatctggtggaatataaggataacggtccggttcttccctcttttgaggggtgggaagaccgggtcggagtggggaagggacgttcttacggcttggaactgatggtgcagaaaaagaccgggcggtttaacggatggatcgggtatacgctctcctggtccgatcgctggtttccggatgggacggtcaacaaaggacatcgtttcccctccaaatacgacaaccggcataaagtcgatatcgtcgcttcctacaaactttcaaaaaaggtggaactgacggcagcctggatgtataagtccggtaatcacctgacgattcaggatgtgcaataccgcccgttaccggagctgacggagcgtagctatcaggaggagctttggtggggatatggcgagaacgcaagttcgcgcaacaattaccagcttccggcttaccaccggcttgatttaggtgctaatttctaccggtataagaagaacgggcgtatgggaatctggaacctgagtctttgcaatgcctattttaaggcgaatcctttctcagtccggcctatttattatcaaacggaaaaagggcgggaggtcgtgttggagcagaccttgttgtttcttttcgtcccttctgtttcttatacatataaattctgatggcgatgaagaagatactgtttgccttgtgcctgcttttgtttgtctcttgtacccgcgacgtggtgctggtccttccgcccgtttctccgcgcctggtgctgaatgcttccgtttcgccggatacggatgtgacggctttcttgtccaaaagttggtttgtcttggacacggttacggacgacggggtcgaggatggcagcatacaagtgtttataaacgaccgtttgcaaggacgtatgcagcccgtttccgatagccggtttacaggacggtacgtgttgcccggatgccgtgtgagggccggcgatcgcttacggctggaagcagaggcgggtggtttcgatctggtagggggagagacagttatcccggatccggtggaggtgttgtctgtcgatacggtccgttttacccgctttggttatggaggatatgaatatccttccatacggctgtatgtccggtttcgtgacaagccggataaacgaaactattatcgcttgataattgaaaaacagacagagttccagaagggagacagtgtgataacctgtagttcgatgtaccggtcagaacttaattatacggattggttgggcgtagtttatgaagatccggtatttcgttcgacagtgacgaatccggttattgagcagttagatgggacgacttgccggggcacgtttacggacgatatgttcgatggcaaagactatacggtccgctcttctttctggcctgtcgatagttcctttaagggcgattctgtaacgacaacggtgcattatgatattcgtctgatggctatttcggaagaatactatcggtatctggttgtaatccgtaatttctctatctcgttgggtgatgcttacttagatggtttggtggaacccaccgccacttatacgaatgtcgaaggtggttttggaattgttgccggttgccaactggcccatcgccgttttacaatgcctttcggtgataaagaaccctcttggaatccgtttgccgtttatgattgatttaaaaaaatttccggatcgagtaggggtttttcctgttttcctgtcttatggatgaaaagtcaataaagataagatgaagaagtttatgtcgagaggatggtttacctgtgtttttgtgtgtttgagttgttttttgatatcggagaagttgtcggcagaggtaaatggtggagatgaggttcgaacggttacattgaacatgtggaacgtttctttgaaggagattctgacagagatcgagaagcaggccggagtgactttttcgtatgaatcatctttgttgaaagagtttcagaaaacgagtttcaaagtgaacgatgctgcattggacgattgtctggcacgactttttgccggctatccgttcgtgtacaagaggacaggaaatattgtcgttctgaaacgtaaacccagacaggtcacgatcagcggttttgtgcgggataaaacttccgcagaatccctggtcggggcttctgtgtatgaagtgaatagcctgagcggtgtggctgccaatacctatggattctttagtctttcgttgcctgtaccgtcgggcagtgatggtgctcccgttcgtttgcaagcgtcttatatcggttatgagagccatctgttcacaattccggtgttgaagcaagacacagtcttggtaatcgatttgcagcctaatgccgcaatcggagaagtgttggtgacagccttggaaacaacccgccaaacggtccgtagtacgcaaatgggaacattggaggtgaatcatgctactattcgtgcgactccgactttgttgggggaggccgatattatccggaccttgcaattgacacctggagtgtcggctgggacggaaggtatttctggtttgtatgtcaggggtggaaattcggatgagaacctttttctggtcgatggtaatcctgtctatcaggtgaatcatatcggcggttttttctctgcgttcaacaatgaggcgattaaaggcatgaatttcttcaaagccggtttcccggcccgttacggcggatgcctttcttcggtggtggatgtgtataccaaggaggggaatatgaaagaatttcatggatccgcctctttagggttggtttccggtaatctgaatctggaagggccgatttggaaagaccggacttctttcaatatagcgcttaggcgtacgtggttggatgtgctgacggctcctgtgttggcgattgtaaataagaaaaataaaaagaatggagaacgtattaatgtccgttatgctttccatgatttgaatgctcgtatcgaccatcgtttcagcgaccggagtaggatgtatttgagcctctataacgggaatgatgtcttgaaagtaggaagtgaagattttgcttattccgaatatacaagcgaatatcgtaatacgatcgacgcctatatgcgttgggggaatttggtcgcttctgctggctggacgtatgcgttcagtaataagttattcggaaaattgtccggtttctatacgcgatatcgttctaaaatcagatataaagaggaagatgtttccggtaaggaaggtgattccggatataagtattctttggacgagacgaccaatgtgacaggaatcacggattttggtgttcgtacctcgtttgattatcgaccggtggcggcacactgtatccgttttggcggtgattacctgattcattattttcaaccggagtataaccggatgaaagcattggacaatagtctgccggattctatgcagattgctaaaactttttccgacgacaagttgtgggcacatgaattggctgcctatgctgaagatgattggtcgatttccgatgcttttcgtttaaatgtcggacttcgtttcagcctgtttaatattgataacaggacgtataccggtattgagccgcgtgtttctatgcgctggttgctttcaccggatgttagtttgaaagcttcttactcccgtatgaaccagtatgtacatttgatcagtaacagctttatggatttgccgactgattcttggatgccggtgactaataagttgaagccgcttgtcagtgaccagatttctttgggtggttattacaattggaatcagctattggatttttctgttgaaggttattataaacggatgaacaacttgttggaatataaggatggttatagtctgattccttcatccgtttcatgggaaaataagatggcttccggtgaagggcgtgcttacggagtggagtttatggttcgtaagcaaacaggaaaaacaaccggatgggtcgggtatgcgctggcgtgggcggatcgccagtttgacgaaataaataaaggacggtgctatccttctcgttacgacaatcggcataaattgaatattgttgtcatgcataaactctccaaaaaagtagagctgtcggctgcctggacttattcgtctggtaattatacaacattgtcactggaaaattattatccgagtgaccatctgcaccagtcaggagaaagacctttctggggaaatgggactggtgaagattattatgaccaacgtaataattatcaacttcctgcctaccatcgtttggatgtgggcattaatatatatcgtcctaaaaagaaggggcgtatgggaatttggaatattagtatttataacgtgtacagccggatgaatcctatcctggtttataaaggagatgtcaaagaggaggctggatcagacgactatgggaatccgaatgtcacctatcggaatgcattcaagtctattggtatttttccgatcataccgtcggtttcatatacatataaattttgaaggaggaaaaagatgagatataatatttgtatattggttttgttgttgtttgtcttgtccggttgcgagaaagagataaatttggaacatatgcgtcctgaacccaaactggtgttgaattgtctggccgtacaaggtgatacactatcggtagaactttcccgtacctggttttatgcggataataaggtcaaagatatttttgtgtctggtgcggatgtaaaactttatgtgaacgatgtgttccgggaatcattgtccgaagtggccgtaaagtatgaagagcttgatatcgatgccgttcgttacaaatcttcatcttatatacctgtggcgggcgatcggatacgccttgtggcttctcggaatggttttaaggaagtggaggccgtgacggaagtcccgcgcccctgttctgtctcgggtttcgagcttcaacaggagagtgtaagagatactactgaatggtttgatgatgcatatatacatttggctcaaaataataccgtgtgcttcactcttcacgacgaaccaggcgaagacaattattatctgatttatttccgtcagggaaatatttggggaggagaaaacgataccgtttattcctggtattcttttaggcctgattatggtagtgaaccggtatttgctgttcagaattcggctttagatcagattttcggatatgatggtgtgggtggttataacggactcgctttttcggacgagttgttcgatgggaaaagctatcagtttaagatcccttggaaaataagtcttagctatactcagagtgtcgattataccccctacatataccgttgttatctgtattccgtttctcgctcctattataactatatgaaaaccatgaatgatttgtatgagagtggctttgtcggcgatctggcggaaataggctttgccgaaccggtccgcatctattcgaatgtagaaggcggaaccggtattttaggcggcagctgcatggagtcctgggaatttacaagtgaatgatcaagtctacgctgaccggataatggtccgaaatcccttcagtttctattccgttgtggatatgggcgtcgacacaccgggaaaccagggatggagaaaccagtatataatccaaccgttcgcttatcccgtgcagacgggtgtcgccatgttgccatcggtaaaggaaagcggtcgggaatgtcgttcgtttatcggcagggacatacaaacggcatatatcggtcagcccgatggataggaattgggacagaactgaataatcaagccgtccgtcacgcatattccggtatgtttcttgttcggcatcccatttctgcttgtttttgatgagttgggcgtgtgtttccacccaatcggcatcgaaaggcgaataggcgttgaaatctcccatgaccatacagttgtccaactgattgtcctgtatgtattttgtcagcatttgcgcttctttcagtcggaacttccagtcgtgagggctgagatgggtgacgatgatatccaatccatacgtttttacgtgcagcatgccgtgccagaaatcttctacttgtttctttacgaccgtgatcggttcgttggaagttatgccgaccgggtatccttcttctttcacgatggcataatacttatgcccgtattcggaggctagttggcctaaatttttttctgtaaatccaaccagttcggttatggccagaatgtccggttgctgtccttttatccagtcgataaagtttgctcgccgggaagcatcatgttcgaaaccgttccaaatattgtaggatataacccgtagtttctcttttcttgctggttgcccgttgcttgttatgggaaataacgatatgagcagtaaggtatagagtatatgatgtagtttcatggttctattgttttgacacatttaaaagtgggtgttgcgataattttgtctattatttctttatgttcagttaccgatccggaacattccgatcttgcctgccggatagaacatgaactggcgttccatctttccgcggatcggattgtattcgtagttaacccctacgccgaccctgaagccgctgtcgttcaccttgaattcgaatgctccgcctacgtttgtatggttgtaaaacgggttcatcagcatatgtgggttgtttctttcgttgtgatcgtaaaacgtatattgtccccatcctctcactgtcatccagtcggtcacgtcatagctggccatcgcattgaacccgcccatgaattggggggaaggattgaacggggtgaaatagcgtccgccgaaagcgcctcccgacagggagaaccggtcgtatgtccatagtagttccgtgttgatccgggtaagaccaccgatgccgggccatgtgtattgttgtccgcttgtgataaaggccacttgttcgctgacggggatgatcgatacttcatggaaatccaatgccatcggcgaaacacgtcttaacatcggtgtgtaaggattgaagaaaggctggtaggcagcagatgaaataatcatgtccatcgggcgctcctgttcatatgcggattggaccggaagatcgggaatgaattcacgcaacttggcttcgatcagttgcctgtccgatggcgtgaaacttttgtatgtgaatttgggcaggttcaagtcgaaaaccgcccgtttgggtactgccaccattcgtccttctttggttctgatccaagtcagatcagattgtgcttgcaaacataatgcgcacaataacaatatgattaaactaattccccgcttcatacaacaactcatttaatttctgcgaagataaaaataaatttagatatttgtgtataaataatgaagatcggtgcaactatccggaaatctgtttcatcatgtaatcagagagtagcaagtatttatggacgaacaactgttaatcgacggatgtaagcgtggcgaagcattggctcgtaaagaattatatgaactgtacgcacctgccatgatgagcgtgtgtgtcccggtcaatttggtgattaatttgtgggacaatccggattggaatgtgtacgtctccgggggggcagcatgatagagaaaggagtgcgcttcgagttttgaaaatcaatggcatagtataaactattatgtgcttccgcttgttatattttatagttacttaaaaaaataggcgatgaaattctttattgacacagctaatctggatcagatccgggaagcaaatgaattgggtgtactagacggtgttaccaccaacccttctctgatggcgaaagagggtatcaagggagtagaaaaccagcgtagacattacatcaaaatctgcgaaatggtgaatggggatgtgagtgccgaagtgattgccacagactacgaaggcatgatcaaggaaggtgaggaactggccggactaaatccgcatatcgtagtgaaggtcccttgtatagaagccggaatcaaggcaatcaagtatttttcaggtaaaggcatccgtacgaattgtacgcttgtcttttctccgggacaggcattgttggcggccaaagcgggtgcgacgtatgtttctccttttgtcggccgtttggacgacattgcgagtgacggaattgaactggtgcgtaagattgttgagatgtacgattactacgattacgagacgcaggtgctggcagcctccatccgttctacacagcatatcattcagtgcgtggaagccggagccgatgtggcaacctgtccgctttctgctatcaaaggcttattgaaacatccgcttaccgatagtggcttggcaactttccttgccgactataagaaggtgaacggatgattttcttcctttttttattcactctttaggctttttaccgggttgctcgaagctgcccggtaactgtgccatcctaccgttagtaatgtgatggccaggacgatgcctccgcccattaggaaatagagtggggaaatgcttatccggttggcgaaactttccagccaacggttcagcagtacccaggcaagaggtgttgcaatcacgaatgccactgctatccatttgacgaactgtcggatcagcagtaacatgatgcttcgtgtgctggctccattcacctttcggatgccgatctctttggtccgctgtttggtcgcgtacaaagccattccaaacaggccgaagcaggtcaggaggatactgatgatggaatacatcagcaataagttcgccatatcggtcgtcctgcggttgcgttgcatgaatacttcgtatacatctatataggtgaagtattcattagggtttacctttttccataccgcttgtaacgtttccatcccttcctttttctgtttttcattcagtctgacatagagtgtccggtagtgttggttgccggcgttattgagatagattaaggaaggcatcgcttcttcttccagcgtattgatatagaggtcgctgacaatcccgcagattgtacatgcctgttttggatccccggccaggacattttggaaggatttgtcataccggctgaccagttggccgacagggttttcaccggccgggatcagtatgtccgcatatctccggtttatgtagactggttggtcatatttctgcatggcttcccggggagccagtccttggtggatttgtaggttcagggtttgcaggagatcttcttcgcccatgtattggaccgacgaatagtaggattctgatccatctttgttttcaacaatgatctgttggagccaggcgaagaggagggaacctccggcacgtgtgacggaggctatttccggtctgttcttcagttcggctgcgaatgtgttgacatccagtttccctcctttccagcttccgatttcgattagattgcggtagcattcgcctttcttttgtgtcagtttcaattgtgcatggatggtgagtgctccgataactagcccgatggagatgatatactgcatgacggagagagcggtgacgacctttctttttttgtttccggtgaagaacaggcggtagttgctatccgtcaggttggcgattttccggctcatgtagcaagctgggataacggacaggattaggattagtccgcagataacgggtagcacctgcctgttcagaaaaaatccggtggtgatccttccggacatgatccggttgaaaacggggatcaggtcgtgggcgatcagcaacgagagcaggaaggcgatgccgaccgtgaggaatgtatccagaaacaattggtagttcatctctgcttgtgtggctcccatcagcttttgtgtgtgtatgatccgtatctgttgaaggatccgggagaaactgagattgatatagttagagcaggcgatcagcaggatcagtaaggctgatatcagcccgatgagtaacagcgattgctgggaacgggcgatataaggaatcgattcctgcgtatagtgttggaaataggattcttgcaaggtatagaaatagtatcgccctttctcctgttgcagggtagggactccgtctgctttgatcttttgggcgaattgttctttgtcgaacgagggggagactttcagaagggcgactcctccaccgtaatagtcttgtccgataccggtgagcatgtcgaatttgaggtaggactgagaatgttctttcaatacggcagcaatttggaaagggcgggaaaggggtgttgtttcgtcctcataacgtatgcctccgtccgccaggtctatttggacaatctttcctaccgggtttgtttttccgaacagtttccgggcacatgattcgcttagcgcggctttgtccggggaggcaagggcgtcatgcaggttgccgtgcagtacttcatattcaaagaagcgggcaaaagtagtgtctgttatggtaatcaggattgggtcgtattttttatcccctatggtgacggagttgcaatcgattgagccgaagcgcagataatctttcacttccgaatattgctcttttagttgaatcgggatctttccaacaataaaagataccttttctcctgacttcagcggcgaatcctgggccatatagacgatcttttctttgttcggattatcagcctcgatgttgaattcatatatgacgaaggctgccagcaggtttgtacaggcaatcccgattgccaagctgacaatcgaaataatggaaaacgttttattgcgccaccaactacggaggaccagtttgagtgctacggctttcatgacttttgttttaatacggatcaaagctatcccctttctgtggatgtcgcaaaggatagttcttttttcttcgggaaaccgaaaatttgtctaattattggacaatgggaccgtcatagagtgaaggaaaatgtttaggtgtaacttgttttcgacaatgtcgagaatatatgtaacattgtggggaacaaattacgtttgattgcggatttcttgatagaaaatataattttgtaatcagaaaaaatgaaactatgctggatgggaaaataattcttgtggatgataacgaagcagtgttgaaaacattgaaaatgattctggcacgcgagttcaagacggtagtaggagtgtccgtgccgacacttttgccggctttgttgcgtgagggcgatgtcgatattgtcctgttggatatgaattttgtgaccggacggcaggatggaagcgagggcttgttttggctggatcggattgtggggcgtcccgatccgccgcaggtggtcttgatcacggccttcggagatattgaactggcggtttccgccttgaaaaggggagcggctgactttgttgtcaaaccgtgggataacgagaagctggtagcgattttacaaggggctttccggcgcaggcggaaggtgcggacagaagcggcttcgatgaggcggatatcggcagaggaggagaatgggcaggtcgtttcccttttggtcgggtctctgttaaagaaatacgcacaggcgtatggaaaacaattgccggttgtcacttccggcggattggataaactctccggtctgatccggcaaggggatctttcggctttgcaacaaacaatcgagcgggctgtcttgttgacggactcgtcttcgcttggggcggacgatttccatatcgaaaaaacggcttccgcatcccgtccggtgacattggaggagatggagaagcagtttatcagtgaggtgctgcgcgagaagaacggcaacctgacactttgtgcccaacagttggatatcagccggcagacgctatataacaagatacggaagtacggtttgtagccggatagacacccttatcgtacaacgatcattacataatcccgttcatgcactttcgggttatccagcagttcgaccaacttcttttgcttgggcgagccggtgcgctttaccagttcgcgcatctcggtgacggtacggagcatgtacaggcaatcgtccgtttgtccgtccggccagaaaggcatcccgtcgtctaggtcgttaatgaagcccctgtttttgtcagccggcagcatgaccgtgcgtccttcttctttcaagtagactgcctggtgggtcaggctcggtttgtagtcatattcccagccgagccagtttgcgatgattcgtccccccttttgataaaggcccatgaacaaacctttggggttctcgtaaaaagttttcaaccacattttgcctttgggaattttagcatccgccatctctttcaggttaagcccttgctccccgtaacggatagcgtagagcggggcgacggtttgcggattgcgtaattggtagacggtgtcgcaatagggcatcatgaaagtcatccggtcttgtccggtgttccagtaaaacgtttggaagaacggaatgctgtcggtcatcgtgtgcggggccaactccccttctttcaacctgaatttgcagagcgtatcgccttggaggttgaacgtcgtgattccgtccggttctcccgttgcctcactttggttacataaggtataaccagtggaggagaaaccaagtagtttgtcgtcgcgtcgaccgagcggatatttctcgatggggctttcggggaagatgtaactttggatcgtcagcatcgtatccagtggcggcaagacactgatgcaggggatgctgtccgtcccggttttccgcgtttcctgagtcttcccgctaagggcgacatacatgcgggtggttttcttatcgtaaaacatgttctgcccgttcatctcgttgttccatttataagccaatgccttgaagccataccgtttgctcggaataccttgtttccggtagtagatgcgcgggttgttgaatgtgataaaggcattgctatccggtagctcgattgcctgggtgacggtgaaccgggcatctccgacggtatagtattcgatctcggaggcgatctggctcaacttcaacggagcgggtttcctggaggcttgttccacatctacgatttttacgggttcggaacggtctatctgggcttccatctgtggggcggccgggatgtgccgtgctttttcttccgtctgcttgcatccgatcgttatcagtaaaacggataggatacctatggtaaaaaggtgctttttcatcttgaatctgtatttgtagcgaatgtaatgatttattatgagcctgtttaaatttccctgaaataaattttgcatagccttcatcggccagctttgtctctttataggattattttgaaaaacaactgtcatactatcactaatttccttttatcaattgaatatcaatagacacaagcaatgatagtaggtatgatggatgcctattccatctatcatactatcactaactgcctgtccgacatttttcttcacattacttattttcaataacataataagataagaccattgacacccgggtctcgatatcattcacactcgggtgtcaagaccgttcacatccgggtgtaaaaagcctgtaaacgggaatcttcggcactttttctgcctgtttgaagcaaaataagtcacgtgtttcaacaaaaaagactgtatctcctacagaaaaacatcctcactccattgaagtcttgtgtgtccaggcgacggccggtatattgggaaaaggtaatagccttctttataggtccggataaagagggctttcgtgtttttcggcggaagcggttgatgagcttcgaccttgatgatcgtgccttccgttccggatgcctgttgttgtttacatcctgttgtcagctggagtgccggcaacaggatgaggagtagttgtttgttcgtgggaggctattttttgagcttggcgatcatgacataattattgtcgttatcgtcgatcgtgttttgaagatcggtcagctttttacgcatttcggaggtgatatcctggtttttcaacgcgttctcgatgtcggtcatgaggttaccgggttcgatattccggatataatagccatttgagaatgcataactgggatagtcgatttccaaattgccgaaatagtcgttatagagtttaaagaaagaaccttttcctgtttttttgtccacgatgtaatgaaaagtctttccgttggtccatgatccgggagcgacttcaaccggcggttctgagaaatctccaatgaaatggtgtggccattctccgtatccgtgccagggaattttatctgtattggcaaagttgagtgtgaatgtcgggatcaaacgactgttgtctccgtcatatcggtagagcgaatcgacgcgggtcggcattatacataaaatattgacatcgaacgtgccggggatattgaatcctgatattacttcattactgaagtcctgcggtgcttccaaatgtcccggttccatgtagccgagcctgtttcctttcaaatcctgtgtccaggcaacggccgcagagcctttgaaaggcaacagaactatcgaaaccttgcctccggtaagatcgacattgaattttgctttcggacaacgcaagcaaagaggaatcgggtctaagacgtttccttgcaagtcgtacactaaaagttgcgatgcattccaaggcaggatatagatgcggttgtttgcctcgtccaatttggcatcatacaccatttggtattcgccggggccttgtccgatcgcaccgatgttggtcaggaaattccctttgcggtcgaatagtttgaatgggtttggccgacggccatgtaccaagatgtaattatctgaaattgtcaccccggtttgtccgaccaatgcctcgtcccgattatccagttttactatttccaatttttctgtgaagaaactgagaggtatgcgtacagtatcggccagtagtttctggtcgcacgacattactttgtctgttcctgcctgtacatattgaccgactatcgggctgttggccaaaggatcgtctgtttgtgcggattgatttttgcctcccgttccgcaggatgttgctattgtgataataagcaaacttcctaaaagtctcgttgtcttgttcataatctccggattaattgtttgtattttgtttgcattagatagtcggatacaaataaatcgatttaatttgttaaaaacaaacatattactgtttattcgtaaaataacgtgcaattcgtattctttctgcctttttgctggtttactgtaattgatgtacctttgttttatgtacagtcgtaggttatatgctaagattgtagggggtgcagtattgatcgtgcttttatccctgattggctcctggttgttaataacacggttgtcatttttcttatcatttgtgtgtctgctgtttatcctgttgataactctgtttataatccggttggcaacccgcttgaactataaattgtccgtcttcttcgaggcgatgcgaaacgaggatacgacgcaacatttccctgctaatccggatgatccctttacgaatgctttatatgccgatatgaatcatatcctccggcagttgggtgataaacatattgagattgaagagaaaagcctttattgtgagagtattctccgagtgatgacacatgaaattcgtaactctgtcactccgatcgcttctctttcggcagacctgttaaaacatctggaccgtacttccatatcccggcaacgcgaaggacttgaagttatcaacagccaggtgaagaatctgactgcttttctcgattcgtaccatcgtttgacacatttgccggaaccggaatataaaacagtttccgtaccggcgttatttactaagctggaacggttgctacaagccgaaccgagaagtgaacgggtcgtttactgcgacggtaaagctgataagtcgacaggcaaggaacttcaagtatatggcgatgccaatctgcttactcttgcattgattaatctgatccggaacgcattgcaggcagtagaaggacaagaggatggaattgtcagggtcgatacatgtgctggggcaaccgggcatctccttataacaataacagacaacggtccggggattcctcccgaacggttgtctgcaatctttactcctttcttttccaccaaatccggcggaagcggtatcggcctgccgatttcccaacgtatcatgcaattgcatggcggccaactttccgtctcatccataccgaatgtccggacagagtttcggatggagttttaatatcccaattcgaaatcctgatctaccgccggaacaccttcattcatccatttaggcatgggggcattttgcaggtagtggttgaagaactggaacatgcgtttctggaaatcgatccggtttgccagacgcatcggccagtgcggttcgccggtatagttgagcaaccacgccggtttttgcaagcgtttaagggcaatgaagtattcgattccctgataccagggtacatgcccgtctgcatcgttgtgcatgatcaggatcggagtggtcaccttatccatattgaacaagggagagttttcaatgtattgcaacggcatttcccagatattgccccctatgcgactctgcccgtgttcatattgcatggaacggtttaagccggagccccaacggattccgccatacgcactcagcatattaacaaccggagcacccgattcgattgcggcaaagagccgggtgcgggtagctaagtaggcaacctgatagcctccccagctatgtccctgtgcaccgatcgccttttcatttacatagcctttggcgatcagtgaggtgatacccggcatcacgcaattgtaacaactttcacccggatagccgtctgtgaagcggacatcaggattgaaaatgataaagccgtggctgaggtagaacggatagtcgatcgttgaacgtccgggactgggcatgtggtagttgtataatgtattggcattacgttcgtaaaaatttacgattaccggatatttcttgttcgggtcgaaatcggccggtttgtagatgacaccttccagaggccggccatccagggagatccaggaagtcagttcggctgtcccccaaatgatggaatcctgctggcggatgccgtctgtcaaacggatggattttttgaaactgaggttggataattggatatccggatattgctcgtatgtttcctgcgtgtagattacggcattggcatcctttgctttggccagggccgccagtttgaaattaccggcaagcaatgctttcggggcaaccggcttgttgaggcgggtagtataatatccggaacctttggttctttcgttaaatccggtgagatattgtgcttcgcttgtattgtaggctcttttctcccgatccagttggatcagcgagtaagtgatttgttcttttcgcccgttgacggtcaggttgaccggagaagaagctgcaatcggatcaaacttccagatatcgtaacggtccttgatcaggatagattgatcgtcatccgtccaacctgctattccgtagggtgaaggatagtcggggacatcgttatcttcgtcccaggcggcaaatgtctgcggagttgtcaggcggtattctttgccgtcggccgtcgaacgagtataccaggaactatcttgatcctgataccagtatgtgtattttccttttggggagaaacgcatgtaggaagggcttttctccttgatctgccggcgttccccggtttccaggttgattatgtagatatcatgaaactggcgtgcggtccacatgctttgtgtgccgtaaggtcttgtggtggagagaagcgcccatatggcattcccctcatcggctgtctgcagagtcggaagttcttctgttgccaattggagaaggcgtccggaaccgaggttgtagatggctgtataagatcgtttcaaatcggtcgctttgttaaaggactgttgcgtgtattgtaccttttcatcccagctccatacctgtacatccgggcgattctcagccaaaagggtcgtgtctttctgtttgggctccggagcagttccgaagaaaagacggcttgcgttttcggaaaaatataagggcgcattttcactgataatccatgaagcggggaatgctttatcccctcgttctgcaatcagtttgccgggggtattattttctgccagatacaggctgctccgggttgcggccgaatctttatggggacaaaacaggtaagcgagcttgctaccgttttcgttgaatgcaatcttcttgaataccccttttttatcggagatccggttatttcctttctgaggaatgtaggtatagaggacagagtcggatacgacgtataacacattccctttttgggcaaatccgaaatcgctgactgccgggaacgagtcttgttgcattccgtcgagcgaccggatataaagcatggagtcttttttgcttccgcgttggtaagccagccagtcggctgtttccgatagtttataagatttgagcgaatcgattgtttctatccctccggacaggcgggaaatgatgaggctgttcatcggcattttatccttgtccgttttctttagcttctcagcctccacttcttttaggggaggcgtttttgtcaccaagagatattcggaggaggaactgaattgtgcttttgcagcaggtttaaaagaacctttctcttctcctttatcattatatagcaggatggtcgcatctccccgccagggttccatcttgcagaatacccatttcccgttatcggaaatacgttgttcggatatgcgttcccatccgaccatttcatcgaatgtcatggctctcttttcctgggcttgtatggataggccggaagccagtaataagagactgattaaatgtatggaattgctcattaatttgattgatttgttttagtatgcaatattactcttttttattaaaaggaaaaagtatctttgtaactttcaatgcttataggaaacaaatagaacatgagagatcggaatctggatatatacagaggggctataatgatctatatcacctgtttttgtcatttgatatggtgggaaggtgtcaaggtcggcatatttgaaggaagctggattaccgggatattctttgcaatggcaaccgtgttttatatagtaggagcctcattttccctgtcattggaaaaaccgtttcggacttatttgaagggccggataaaaagagtcgcgatcccttactggaagtatgcattggtttgttttccggctgttgtgtatcattattggaagtcgggagagataataccgttgaatgactttatatcttatgtgttctttacccctacggtagaatatcgattatttgatcatatttggtttattccgccttacttgatcatatctctttgtcttccctttttatgccggatgattcgccggtgtaatataccttttatccttttcagtgtcgttttggtattgttgctattgttcaaagcttattatccagagttgcttcaaactgtaatagtctatctgttttttacgatatggggattgtattataagaagaagttaggctggcaaattgttgtttgtgtaatagctgccgtaggatatttgatttatgctttcggagttgaaagagtcccttttgatctgcaagctaataaatttccgccaaacttattgtttgcctcatacggaatggctgttttaggaataggtggaatttatatgaaaaagggattagttttcttatatgacagatctgcaatggttcgtcgttatattgatatatattctaatgaaggatatgaaatatatttggtccatccctttaccatcattctgttaggcggtataaagcggcttttggggttggacccaattattgccgaccatctgtatttgcaaatggtgtatattgtttccggctttttattcatactgtgcgttaatgtctatgtgctgaaaacttacaattatatatggtctttggtaaatagagttttttaagtcgtatttcctgccatgctcattaaccagttggatctttgatttataatccgctgcgtgctgaattgtttcaggaagaatacggttccgtctttcacatcccgtatgcgggcctgtcttctccggtaaagttcgtatatttcaggtaggagatcagataagtgaaagagccgtcatacagcagctacggatcgttgcttatcaactccgggataaataagtaaagtccgtgtttcatattcatttgaattaggttatttgtcttttataaatgtacggatatcttccgacaagaatttatacccttgtccggctttaaggacggtgctttccggtgaaatatagataaacgaaggaagcgcatgtaccccgtaatgagccgctatgccactcatgcccagtccgtcggacagttgcagccagttgtctgccgattctttgacttctgtctctttccaaaccgcttctggatctacagacaggctgataacgacaattttctctttatatttttccgcaatttcctttagtaaaggaaacgcatcgaggcaagggccacagtatcggctccagaaatcaaggatgatgtatttccctttatagtcggaaagatggtggatgttccctttgatgtctttcagttcgacatccgcgatcttgtctccttcctgaactgtcgaggagatagacagcaaggaagttatctcttctcccaaccgggattgtctttgttcgtccgtcagcttgctgtagacagatacgactaacgctttatccttcaactttcccgcctggcaactcttggcagcgtctctcagttcttccaggccggcatcggtaatcggatagtccagcatgagcagcaactctttttgcaggataatctcgtcatgtatgctgttcaccgtctgcctgatcgaagcaaattcctgtttggcgaccgaatctttcgctctgatcttggggagcagtttcatacactctgccgttaaatcgtggatgcgtatgttttcctcccgtgtagcctcccggaagcggttcagttcgacttgttcggggattggaatgtcgctttccgccagccagttctgcacataaggggcttctccggtgattttgatgttcgctccgggcttcacccatacggtgtagccggtgttgttgagggatatgtacatcttggtcgtcctgtcggcttccctggtgaatttgaatttgccgttcaccattttttcctgatcttccggtcgtacatccatcccgtttcctttcatctccgcgcaaaaaaatctgacggtatccggcatattccgtatgtctccttcgatcgtaacggtcttttgcccgtaagcggaagaagcgcagacaaagattccaaacaaccatgcaagtgtcttcataagcaattcgatttatgattagtgccggcaatatacaagtttatttgatttggaatcatgcggggtacgataatttcgtaagccgtaacatatcttgatacgttacggcccattctttcccttttataacatttaagacttagatcaacgtctccgttaccacctgtccgtcgaacaggttgatggtgcgggaggcaaacccggcatcatgctggctgtgcgtcaccatgacgatcgttgtcccttccttgttcagttcgctgagcaggttcattacctcttgtccgtttttactgtccaggttaccggtcggttcgtcggcgaggatcagcttcgggttggccactacggcgcgggcaatggcgacacgctgttgctggccgccggacaactgctgcgggaaatgcttttcgcggtgcacgatcgccatccgttccattgcttcctgtacctttttctttcgctcggcagccgatacacccatgtagagcaaaggaagttctatattctcgtatacattcaactcgtcgatcagattgaaactttggaagacgaacccgataatccctttgcgcagtttcgtccgctgggcttccgtatatcgggatacttcgatcccgttcaggtaatattctccgctggtcgggttgtcgagcaatcctaagatattcaacaacgttgattttccacaaccggaagggcccataatggctacgaattccccttccttcacctctatgcttactttattaagagccaacgtctctacctcttccgtgcggaagatcttttctaatgcaactgttttaatcatggtctttaactgatttgtttacgagaaatgtgacaaaagtcgtgccataatcgtaaaaaacttgtagataagatgttatctgttgtgccgggtttgatgatcgtgcatatacgcacaaaaggagttcggatgcgcacggtttatcataagcatctgtatcttttaccccgttcttctgtatatattagcacgcttatcttaacccataaatcgttcgcttggcggcgaacggttgtccgcttgcaagagaacgatcgttcgccgccaagcggacaacttataagtagaaggaaaagggctaaataatacggtacttcttcttaattcatatagtataagttcttaattggttattataaccatacctcttcatgttttatgcgtcactatatatattgcaagtgcgaggataattccattttttccgtatgtttgtggtgttctaaagaatcagatatatggaaaagacaaataacgcgtctttgtattggtacgtcttctacaatgaccaacttctactgcaaaagaaagctgacggctatgtaatcccttgtacggacgaagcgcctgtgacggttgcccgctcgcttccggtcgagatgcaggacgggacaatggcgatggcggcttttaccgatgcgcccctggaagagacggatgttttcatgcctatgggactccgcgcttcctatgatcatatcgaccgttactcctatgatcaggcggggaaagcgtatgagattgtctattgggatcaacacagccggttttgtcctgtctgcgggacgccgacggaactgaaagggccgatcatgaagaaatgccctcattgcggcaatgagatgttcccgtcggtatcgcctgccgtactggtcttgatccggaaaggtgaggaaatcctgttggtgcatgcgcgtaacttccggggaacgtttcatgggcttgtggccggcttcctggaaacgggggagacgttggaacaatgcgtggaacgtgaagtgtgggaggaaacaggattgacgatcaggaatatcacttattttggcaaccagccgtggccgtatccgagcaacctgatgatcggttttatagccgattatgtcagcggggagatcaaattgcaggacgaagagttgagttccggttccttcttctcgaaagataacctgccggaaataccgcacaagctgagcttggcacggaagatgatcgactggtggttggaaaattgaaagttgaaaattgaaaaataaatcactgattattatgaaacaaacgactttgtttatcttttgcttgttggcgatggcattcggtgcggaaagtgccgcttcgcaggtgacgcgtgccgattacgagcgtgctgacacgatcctgaaatgctccgaccgggtttattctcctgctatccatcccgaatggatagacagttcacactatttttggtataagaatcatgagaaggaaggagatttctactatctcgtcaatgcggagagtggaaagaaacagcgtgctgcggataagaaaggattggcggcattcttctccaaaaagcaaaagaaactggccgaatccctgctgaaagaggaagagaagaggccggatcgctggcgtcgtcgcgaagaggctccggttcctgttgtctcgcccgataagaagtgggaagcgtatgtgaaagataataatctctatctctcgcccctctgggatgagaaggagaaagataaaccaaaggaagagattgccttgacgatggatggcacggcgaatctgcgttatgacggttggtcgatcatctggtcgcccgactcccggaagctggcaaccgtgaaagtgcgcgacgtgcaggaacgccgcattccactgatcgaatccagcccgtctagccagaagcagccgatcctgcaatggcgcgactatgcgaagccgggggatgtattgcctgtttacctgccggtgctcttcgatgtggaggcgcgcaagcaaatggcgttgaatgtcactccttatgaaaatcagttctatctgaacctgaccggttggcgcgaagacagccgcgcgttcacgttcgagttcaaccagcgcgggcatcagcgttatgtcattggcgaagtgagtgctgccgacggttctatccgtcatttggtggatgagcagacgaagactttcatctattattataacaactatcggtatgatctggatgacggaaaagaattgctttggatttccgaacgggacggatggcgtcatctttacctgatagatggtacgagcgggcaggtgaaacgacaggtgacaaagggtgaatgggtgctccgtcaggtcgattatgtggatgagacgaaccgggttgtctatttcaccgcttcgggctttaataaaggcgaagatccttataacctgcattactgccggattaacttggatggaacaggctttaccgatatgactcctgagaacgggaaccaccgtgtgactttctctgccgaccgttcttattttaccgatgtctattctcgtcccgacctgccgcctgtcagtcagttgaagcggacttcggatgtgtctgtggtggccggattacagaggtgcgatgtgagtgcgttgcaggcggaaggctggcaaatgccggaagtgttctgcgcgaaaggccgggacgggcagacggatatttgggggaacatttatcgcccaatgcactttgatgcttccaaatcttatccggtcgtagagtttatttatgccggtccgcatgattcgcatgtggataaggacttcaaaccggcccatcatctggtctccaaattggtagaactcggctttatcgtcgtttcgatcgacggtatggggacgtccaaccgctcgaaagctttccatgatgtatgttggaagaacctaaaagatgccggtttcccggatcgtatcgcttggatgaaagcggcaggtgcgaaatacaagtatatggatttgaatcgtgtcggcatctatggctggtcggccggaggtcagaatgcgatggctgctttgctgttccataacgatttttataaggttgcagtcgccctttgcggttgccatgacaaccggatggataaaatctggtggaacgaacagtggatgggctatccgatcgacgcctcttatagcacctcctccaatgtcgacaatgcttaccgtctgaaaggcaagttgctcctgatcaacggtgaactggatgacaacgtcgatccggcttccaccttgcaggttgttagtgccttgatgaaagcaaacaagaatttcgaacagctttatctaccaggcaagacgcacagcctcggcggtccgtttgaaatgcacaaaatgcacgatttcttcgtcaagaatttgctggggcaggaaccgccggagtgggagtaacctaacggctctcaatttcatccagccagatttccaagcaaacctgagggaatagctccattgtttcctgtacggtagtcaacgacttcatccggttagcaatcttatccgctgtattggggtaggctgtttcgatcagatcgttcagaatgaaagagaagaaagggggatttcgttttaggtagcggtccattaacaaatagcaggtagcgggagaggatgacagtattagctttttcagatctgcatactcttccgtttccatatattgatagggagtattttctgatcccatttcatcgcatttgtgaagaaaagagttgaatgtctcgttgaaaagcctcttttctgtgcgggaagccatttttatcccagtattgatacgggtgcggaggtctggtgttaccttgaaaacatccggttccggataatcttcattactgcatgctcccagcatggcaaagatgaaaagtgccaacagtgtagctaatagttgtatttttgtcataacctgtttccgattaatatttcttgtataactataagacgttatatgacactggattgttgcaaaatgatacgactttttttgaaaatttattctatgggctgtttagttcatcggagcaaaggaggttacgtgtgtcgtgtcttttaactgcaacgaatccttgcgtgacaaaagcgtatcctgcctggcaaattccggatgaccagttgcgagtttcttctttttcttgatgatgtcgggagtaggtagattgttgtaatttctccatgtcccatctcttttggcattacgtttgtgtatataactcttcctgctggtcatttctgcgaagtcgaaagtgacgaagcctgtgttatgagaacgattcataggatcgtttttccatgtttcgagcatatttttatagaccggtaaaaatttaccgggaggaggagcatataaccagaaaacaccaggaggcaggtcctttaatgctattttacgatgggttgaatctgtttgtatgtattcggtgaaatctttgaggatgggtaacggggttaccggtgacattttcatgtcggaagccggttcatccaagtttataaaagaacctgattgaatcgctttcatcgtctctggattcagttccagcttttctttaccggacaagacgttctggagccagactgaatccttttttgtccactgctgtgcagatatataatcggcacctttcagacaaatcaacatcactataagcagttgtttgtgcatattatattattgcatcatctcttttacttttgctttcaacgcatcgcctctcaggtcgcgagctacgattgtcccgtcagggccaaacaagatgatatgcggaattccgttgaagccgtacagttcagaaggcgtgttctgggcattgagaatctgtggccaagtaatcttcaaatcttcgatggctttctttgtatctttcggctggtcccatgtggctacaccaagtacttggaatcctttatccttgtattggttatacacttctgccagtatcggggtctctgcacgacaggggccgcaccagcttgcccagaagtcaaccaatacataattcccttttcctacatagtcggagagggaaacctttttgccatcttcggtttccactgtaaagtcggtgaaaggttgtccgacggccgtctttttcaggttggtaatccgttggctcagtttccggatgatgttcctactttggataaaggcgctggattgggcaatgatagattccatttcttccgggttcataaagttcgataggttttgaagggcaaaagcaccgatgtaattatcttggtttttatcgatgaagtccttcagcatagccatataggccggcttatactcattgtcgtaataggtctttgtcaattcttggactttacttttatcttgttcctgctcccggatctctttcattttgttctggaagagttcactgattcttttttcttcttggatatagctgctgaaggtctcattcaagggagtgccggacgcgctgttcggagtttccatgttcagttggatggtaccgttttcgagcatgaaggtggtatagtatttccttccgacttgggttaggcataaaacagcggtgtcaatctgaccggtgaacgtaaacgctccgttttcaatcactgcgctgtcaatgttttgccccttatcccggtcgaagatatagactgttttcccattaaaggtagaatcggggatatttcccattaccgtgtaggagggaatcggctgtgaacaggaggcaaggcctgctcctgccatgagcaatgcgattaatgtttttgtattcataaaataaatattaatgttttgaggacaaaagtaaaacatgttggcttatgataagccctaattcatgtaatttgtcttatcatccaaaatattaattgtttttagtgctgtgttcccgcgcttaatgtgggaacacatcctcctttattccgttttgattacctctgccgggttcaaccgtgaaatcagccagatacgataggcgacggttacgaatacgatagtggtggtcagaaggaggattgccagccacatcaatggattgtttaaccagccgggatcaatcgttatcttttcttgcgtcaatattcgcaggagcatatagacgattgccagcgcagggatggctgaaatggcaagtaaacggatatatagtttaccgaacaatagtgcaatgaccttagggccggctccgttgattttccgtatggcgacttctttttgccggctgaccgtgtcgagtgtaatggcggaatagatacccaggactgtaatgactatgctgataacggacaataggctgaacaggtcgcttatcagcatctcccctccattgagccggaatcgctcctcttgtttggtggtcagcaggaaaggaatggatgccggcaaccagttatgtacgattttgagtatttctttccgtacgttctgttcctgtccggctatgcatttgatgtaagcgaccctatagttcggttccttaggaacggagatgaaggagaaacggtgatattgagattgattggctttagccatttgatcttgggtatataccggttcgaacggtagttgctcatatatgccggtaatctggaaagtctggtctcccaattgtacggatgtcggattcttttccccgtctttctccaattcccagataagcgaccgtgaaaccactatttcgttagccgcctgtggcattcttccctctatcggcagtttcatgaaagacgggtagtttttactggtgaggaaatgtatcccgtgcagtgtctctccctgtttgttcttataatccagatatttgccgggagtctctaaaagcacgtcttcaaccccagcaagcgtacggatacgggagacgatctcttcttcgtgtccttgtacttgcggttcccaaagttctatcttccagatacgggtacattcttcttccgtcagcgtgttgttccttttttcttctgcgaggtggtaaatatttcttagtccgatagctccggcaataaagaggaaacagatgaacagttggactcctaacatgaagttccttatactatgtttctgtcgtttcacgccttttattccttctgtcaatgtgatatgtttgatgcggaagatgaccaatgacacaatcaaggcgcagagaacaaacaagaaacagagatactccatttcctgctggatcaaggtaggcgtatggataaacagattctcgttgatcgtttctttcgaggccatatactgataataaacaggcactatccattcggtcaggacgagacttgccaatgccgacaggatgaaaagaaccgcaatctcgctgaagagtaatctgaacaatccttttgcgtctgaacctaagcatttccgtaaactgagttctcgtgtccggttatagaacgactgaatgcagaacttcaggaagtttatcatcgcggcaatcaatatcaggaggccgatcaacgggatgaagaatgtcgcactgagattatccggtttgtacatctcttccttgaaagtgcgtgctgtcagatagtgatcgttgttttttccaaaagccggtatttgttggcgtaacctttggtttatttctttgcttgaaacacctttatccagcaggaccaccagatctcggtatttacgttttggttggatgccggctgtttccaggaaataaaagtcactcttttcccgtgtcccatccggaaaatccctgataacggcgctgattgtggaatagtggatggcagacgtgtcgctgtctgcacgactgaaatagagtgtttttccgatagggttttctgctccgaatatttttttcgcggatgattcgctgatgaatacttctcccggtttgagtgtcggtgtctggccttccaacgtttgaatgctgaatatggtcggaaaatcttttgtgacattctggatgctgcactggtacgggatttctttctggttctctttggatatggaaatattggcttggccgtatccgtatgaataagcgatttgcccaattccggtgatcggattccccatcagttcttgcaccacctctcctggaatataagggtcctcataaccgtattgggccgatttggcatatatattcgccatccgatcgctgtttgcccaagcaataaactggttgttgaatcttctgatataataagaggttatactgaaacaaagaagtccgactgcgattccgatgatggaaagcaaatactggatcttgtttttaagaatttggcggatagccattttcaagtagtgtttgaacatgatgtgatgtttttgtcgttattatgtttttgtttttattattccgttttgattacctctgccggattggtggcggctgcccttttgacctgacggaatatagagagcagcacgatcccacaggtgataaggaaaaccaacaggaacaatcctgccggcaatgtggtatggttggcgtatgtctcgagccaacgttttataaccaagtagccgactggaagagcaaaaacattgcctaatgtcactaatatgaaatactctcggaagagcagttgaagaatgtgataaaaggtagctccgtttactttgcggatggcaatctctttccgccgctgttcggtggcgaggctcaccagagagtaaatgccgaatgtggagataaggatgcaaaccagcgaaaggatgctgaagatggtaaagatcactttttccggccggttgaaccgatctattagatcggacagctccgtaaacattttactccggttgacattgtcattctgaatatgtgatgttatctcgtgaagatgttccagcacttcttttttatgtccttttgcatagcggacataaataaggtaaggacgctcgaagtcttttaccatcggattttcgtatgtggtgaagaacagcggtaatataggatattgcatcggagcgtagagatagtctttgatgacaccgcaaactcgggcttggcttgcttgcccttttatgtatataggccgttcaagcagatccgtgtagcctaatgtttgcaggcaagtttcatttaccatatagctatatggggttgcgtccgtcggccagctacctgctttcagttgcagtttgaagaacgaaaagaagtccttgtcggcaacgattaccgggctgtaactattgggttcggcttcattcggatcgaaacagaaatacgagtaaaaggaaccgtaccaatccccttgttccgtaaagatcggagcgttcccgcaggtgtatgtgacttcttctacatacggatggttggccatttccggtttcaaaacacttaaatccgtctgaaaggaggtgtcatatcctaaatctacctgtatgacccgttcataatcgatccctttatcttttgaaaggataaaatgcaactgtcggaacaatccgatggaggtgataaagaacagtgaaccgataaatatctgaacgatgatcaggccctgtttgaaaagagcaggcttctgtattttatgctccaaaagatttcgtatcggataataacagataaaaaggaatgccaggatacagattccggcgagcgacagcgtattgcctaaaagtgaagttcgtgaaaggtggcgactgacgttctcatagataccataccggtgccaggtcgtatagctttcatagtaaggatagatgctctcgatcagacagaaagaaatcaggaaggcgatgatcaaaggaagtgccagttcgatgaaactttttgtaatcatacttgtggttgaggctcctatacaaagataagtccggtttttttgttgtttccgttgctgttgaccgataaaaaggacaagtaggttgatcagagcgctaaggaaagccattgtcccggccaaagccaggatatgaatgttacggatgcggtctgtcaattcagggtggcaccgaagatgcacttcggaggctgtcagcaggtttattttccagttttttacctgttcgcgatcccatttgttttcggcatggcttttatagtgcgccagtttgttccgtacatttgccacgttcgcattcttttggagccgcacgtaggtcgtcatgcgtttgacatgattgggttgaggggttctgatcaacagaaagtcgaacagcagatcagtattatccggatagttacggataataccgactacagagggacgaagattattatccaatacgacttccttgccgatacagtttgttgtcccgaacaatttgtgggctgtccgttccgttaaaatgacagaactgccgtcgggaatgaccccttggtgagtcccttcgataaaatctgtccggaaaaggtcgaagaaggactgttcgctttccattccatgcaggttgattgcttcgttgtcctgtttcaatgtaaagctgaggtggttgaatgaacaagaggcttcgatttcggggagcagcttgaataattcttcccggtcgttaatatgtaactggtctaaatctgattgtgttccgttggcacgcttgacaagtccctctgtcgtcaggcagtaaagtcggtctgcttccggatggaaattatcgaaatgtgtctcccaccatagccagtaacctcctaaaatgaaggtagtaaatcctacggccagaccaatgatgctgacaattgattgagttcggtatttcagtagttcccgaaaagaaactttgacatagtgtgataacataatctgattgtttgttataaaatattgttcaaagacattcttattccgacttgatcacttctgccgggttctggttcgctgccttctgtatgcgccaaccggtacaaagagtcagcagcaggaccagtacaccccagatgaccggataaagccaccaactgattgctgcttgcaacacatagttttcaatccatgatttcatgatcaggtaactggccggaaatgctatgaccgaagcgatgcatagcaggcggagattaccggcaaaaaacattctcatgatatcggaggcctctgccccgtttactttacggacagcgatttctttcttcttctgttcgcagtccagagttacttgagagaatacgccgaacaatgagatcaaaatacagactatagtcacgaagtcaagcatcttgagtagtgccttttccgatttcagaaacttttcatactcttcttccataaaagtaacatatatgtcgacggcgttcggctgcattttctttgccaactgttcaacctgttgtttgcacagttcgcggcttcccgactgatgccggaatatggcagtcgttgaataatcattctgtatattcttttttcccggactgaactcgagcataaccggctttaccggaacggtaggaggtgcgatataaaagtctttgaaaatgccgtcgatgataaatcctttctgatctttgcggctaagtgttttgccaatcgggttgtcgatcttcaattcctttacagctgcttcgtttaggagtatgtgccgttcggtatctccttccggcaacttgccttttagcaattgcagaccataaaattcaaagtagcgattgttgcatgggattatttggatcgtaagaccttccacagaggccggcttgccttcccaatcggtaaaggacctgtaggaacgtgaatggcttggaaatagtggatcgttttcatccggatatacttcggcgatggaggagagtttggcaatttcttctttcaaaccgtctgtttggggatatatacggacatcgccccggtctttccggtttagtccgatatcggtggtgtgcaagtgatggatttgcttgatcagtaccgacgaacagaatatgaatccgatgctgattattaattgcaaggtaaggcttgctttggggaagaggttctttcctttcccgtcagacgaacctttaagggccttttgtagcgaacgcttcctgaaatagtagatagggaataaagagaacaggaaagccagtaaggtgatgaatccgaaatagacgaatgtttccagatagagactgaacgaattcgtttttacattcgataattcttggaatacaggcagtatgatttcgatcaaggctattccggctaaaagagagatggaaagcgtaagcaggtattcggaagcgaacaggacaaacagattgccgtcagacgagccgcacactttccgaagcccgatctctttactgcgtattcgtatacggtttacgaacagggtcagatagttgaatagtgcgcacaggattaccaatcctccggcaagagcgaatagcaagatatgttcgaacttgatagttggctcttcttcggggtggtcataccgcatggcggtgattgacgtcagaacgaaatgactcagcgagtctctgtctttctttgttttatgttcgtaaagtttctttttaaaagctctcatatccgtttccggacggacctttataaaagtctgacaataggctacgttccattcctccgtttgtcgggacggcttcagtattccgaacgggaaattcgagtgctggtcctgacttttgactatggcacatatttccatatcgtcagaccaaattttcagtttttcacctaatgggtcctttgtgccgaagacctctttggcaagcttgtccgtgatcgcgatcttgttacttttcgggatcataaaatcccggctaccggagatcagttctatttcgaacatatgttcggcagctgaatccatgaccatgtcgaaagattcgtatttcttctcgttgtagaggaaatcggttttccaggcactcgtgttgcaactttcctctatctccgggaatgtctctttcaaatatcgggccagcgggtaaggtgtaacgcttgataatccttggtcatcggtttccgattccatccggacgtaatagatccggtcagcgtctttcctaaacgtatcgtaggtcagttcatatcgtatccagagcgacgataacgcgaaacttgtaaatccgattgcgagcccgacgatacagatgaatgactgcaatttatatttcaagagattacggaaagctattttgatgtaatggtatagcatggttcaatgatttagtttgttattattccgatttgatcacttccgcaggattggtccgggcagcctgtatcgtctgatagaggacggttccgatgatcagagtgatggtggcaaatacgattacgatatacatccaggcagagatatggctccgataggcatattgctgcaaccaactttgcatgaacaaccacgcgagtggcaatgccagaaggttggctatcaatgcaattgtcagatattccataaaaaacattttgacaatcgtgccggcagaggctcccatcactttccgtatggcaatttctttccttcgttgttccatattgctggatgaaatggaataaagcccgaagatggagattagcgtacagaacagggctagcaaagtaaagagctgcaggctggcatcttcggaagtgctgagccgatcaagtatctggcttatggtctgtacattgcaggtagtgggatcgcctgacttagagtgttttttgaatatattccggattgctttgatcgtggctttttcttttcctggttcggtacgggcataataaaaataactgttccatttgctttggtcgattacgatcacttgtggcaggatcgggttgcgcaaactggccgcttggaagttttggatgatcccgacgatctccatttcggcacgtcctctgcttccgtcttgcatgatcgtataattccaaatactgattttcttgccgatcgggttatcgatgcccatgatgcgagcagcttcttcattgatgacggcttttgtccaagaggctcgccaatctccattgtctgccagatcgccgtcattgatgaaacggcctttcagcatcggtatgttaaaaacttccgagaagttgctgcctacttgcaggacttggaagtttggattgaaatccagtggtttcccttcccattcgacttcgttttgtgtataaggttcatgggtgatggtaaatattccggcttgtgtgaatccttttaggactgccaatgaagaaatctcgcgactgattccttcccggtcgttgaatgtcatttccatctgtatcagaccctctttctggaatcctaagtttttatgtttcatgaaagatatttgcctgaacatgataaatgtgctcatcaggaagaatatgcaaatacatagttggagtatcatgctgattttgcggtaaccgcttttccgggtaggagagattcctccggatattaatagagaagaagcgcgtacaaaatgcaggaataacggtaggctgacaatcgtgagtatcaaccagctaatacctgttatgatacaaagatggctaaataataactttcgttgtaatgtcgtttcgaagaggtgtgagaaaccgccaacggttaattccaacaggcaggaagccaatagaaaactgatcccgacaagtaacgtcaattccagcaacaactggataaccaagttctttttatcagcgccgatcgcatttctcaatttcatttctttgtttcgtaagtagatacgattcaacagcagattggtgaaattaaagaaaacgcagagtaacaataagaggccggttaccgtgaatgtccggatgtaggaaagattaaatgtcaattcacttccgaatgtatgacggacatctgtcaggggaaccaactttaacaaaattgatttattatattcatgttcgactatataagaattgatcttcttctcaaaagcttttatattaatgttgggtgctaataatagatagattttagtgtttagcaaggcccattgtttttcgtccgtgatccggttttcccggtcacggtcgaatttgtccagttcataaacatcggcttgcatcatggagttgttgggcgaatcttccaagacggacacgatcgtaatgcttttacgatatccgttttcaagggttttgcctaatgcttcctccggtgttttgaaatatttcacggcaaaagagcgggtgacggctatctcatccagcgttttcaggatatcatcccttttaccgcaaattacgggacgtggaaagaatttgaaatactgttcgtcaatgaattcctcgtccggatcctctaaccttgtttctccatatttgaaagtcgagccgtatttggaataaatctgcgttgtctctattacttccgggaaatcttttttcagtttgcgtgccagaataagcggtaattcctccgatttctttcccgtttgtttatcgattccgtatattcggtaaatttgtccggattgtggatagaacccgtcgtagttcgtttcatacctgtaccagttccatccgtatgtaaaacagatcagcccgattgccaagccgacaatactgatggcagattgtactttatattttgccaagttacgaaatgcaattttgatataatgttgtagtatcatgattcgaatattattttaaaatcagttcttccgcatccccaaaggtactatatcctgtgacaatcaccttgtcgcccggttggaggccaccggttatttcgtattgctgcgggttttggcgaccgatgctgaccggggttttccgggctttcgtgccggattcgttcagtttgtatatccattggccgccggtggcctggaagaagtcgccacgtgggatgacgagggcctcttccggttgtccgagttcgatctggacacggaaactttttccgatgcgtacgttctccgggcttgcctccgtaaagaccaggtcgacatcgaagttacggtctttgacttccggaacgactttggtgatccggagcgggtactttttgttttgccaggtgatggtggcgggtagaccggtggtgatccggtcgatgtagtattcgctgagggaagtatggatcttgaactgatcgaggactttgatctcggcgatcgcttcggtactttgcacctgttgtccgggagttactttcacaaagctgagttgtccggagagaggagcacgaacaaccaagtcctccatgcgttcccgggcacgttcgaactttttacgttcccgttcaagatcgtttttcatcaactcccggcgcaagatcgtagctgcactatcatggcgcaaaccttccaactgcaaagcggtgcttcgggttttatagtcgaattcgtcccgggccacttcgagctgtgctttgcttttgactcccatattgaattcctcttcgtcgagtgcatagctttttttgagccggttcagttcgtaggtcgtttgtaaggtcttttgttgcaggtcgatacttttctgttccatctcaatctctttctcctgataagagatcagctgcttttcccattcatcctgttggtcctcgatggcgcggataaggtcgggattgttgagtgtcaggatcgtgtctcccttgttcatcatagttccttcctctgcaatgatcctgtccacgctgccggcttcgcgggtgttgatctggatggtgaggatgggttgcacgacaccttcgacgtctacatattccagaaatttgtcgcttgtcgcttctccgatgatcaggttttctgcatcggtacgaagtttcctgccaccagaggcggcgatcccgacatagacgagaagaacaataaatgcgattcccccggcgatatgccagcggtagcggtaataaacgggtttctttgctatgggcttgtccatgtatatgatttataatttatgatttatgaattgtcaattgtttaaaaggagttcatagtcttctgtgatcgggatcatcttctcgaaatcgtaaccggtcaggctgcggagaccgtaatagagattccaataattatataaagccgcgatgtaagcacggcgagaattgtctttttcggctatggcggcattgaggtcgagaatcgtcgatttgcctaacaggtagagcctgcgtgccacatcgttacggcgctgggccgtttggtctgttttataggctatggcaacttttcctgcctgtatgttgaattgcttgacaatcttggctacgttcagttcgaaatccatccgctcctgttccagttcggtgtaaaccttgtcgcggttgcttttggccactttcacccggcctttacctacgccccagtccaatatcggtatgcgtatccccaatgtcaccaattgctggtccatcgggtcgcggtaggattctttcagcttttcgttgctttgcgtcagaccgaactgtgcatataaggctgctttaaaaccccggttggcttttgcctcggcaacgttgctttcactttgcagccggcggcgttcgaaagcgctgatatccgggttgttttggaaagcaagctgcatggcttcgtttacgtcgactgtgaagtgagggatgctgtcgtcgggaatcactaccaagtttatattttcggaaatgcccagataactgcggagcgactggatataatcgtcgacctcgatttgcgcattgaggcagtttgtctgttcggtcagtttgttgagttccaattggagcatttcgttttcggtgatcgttccgatattgtaacgtccttgtgcataccggtaaagcgtgtcggcgtatacaaaattatagttcgcgatttccagcgaggtctgtgccgtagccaagttaaaaaagcggttggtcgtataggctgctaccagttcgagtgtttcgatataggtcttttttgcttcttcgtatttaatcggctcgatgcggcgttcccatttaaggtcattgaagccgaataagtcttgttcatatcctacgacgaccggagtacttttgtaagacgagatattgtcggtaaacatatccagtctttcaagtccggttttcaataaaacctttccccctgtaagggctatattttgttggatttcgaggctggcatcgactgagagttggttccgatgcacaaacttgtcgctaccgtcttccaaggtgacagactggatggaacggttcaagctcggatcggaagtaagcgtcaggctcggcaactgtttagcccggaacgaacgccagttccagtaagaagccctgaaagcgtgacgggcggcaatcgcttcaggagaattccgacgtgccatttcgatagcttcgctcaatgtcagcgtaagtgttttctgcgcctggagctgtaaggggagcagaaatagtattgctatgtatattatttgtttcatggcaaaaatgaagcaaataatatgccatttttgtaaaaggttggtacttatgtaaatagtgatgtgaagtgatatggatagggtgctaatccgcacaatttacgtgcggattagcacggtatattcaggctgaaattgtattaagaaacgatagacatctctttatggttttgcgggattctctatcactctatcacgctttgctttgtaagtattgataagcatgatgtacaaggagtgatacatgccggattcatgtatcactcctgtgtcacacttgtatcaattgtctcgtcctgattttggttgactgtgtattaaaaaaatcctgttataggttgtctataaatgtaaaaaaacagacaatcctttcttaatcctaaaataagttaccttatcctgtttcactacaggacagggggcttttcacagccaaactcatcggccggggagcgcccaagcggcaaggggcagggccacctgtcccgacgagcgtttccggtctctgttctattttgttgcaaatatatcagtttaatcctgttcataaaagaatagcttgtttacgtttataaatagttttccattttctttttaaaggccccttcttcgcatgcgcctcttcaggtgtcaacatttccacactactgtgagggcgccgggtgttataaatatcgatcactttcctcactatatcccgagcctggccgagcgttgttatcatttctttattcaaccattcttcttttaatattccattgacacgttcagctattgcattctctctgggatctccgttttctgtcatacttatacgacatttaatgccttgtaaaattgagatataatctttgctacaatattgtactcctctatccgaatgatggatcagatcgcttcccgggggaagtgtttccaaggccatattcaacgcttttatcggaccggacatctccagggaatcctccagggcccaaccgacaatcttacgggagtatgcatctgtgagcaaactcaaataatagaatcttccttcgacattgcggacataagtgatatcagctacatataactgattggctgatagtggatcataatcttttatcagatttggatacttatgaaaacggttccatgacagagttgttaccggccgataaaccctggaatgtctgatcaacaaaccattgtcgcgtagcaagtcaaaaaacttatcgcgccctatatccaaatcaggatgtatcttggtttttaggatatgatacaacttacgaccacctaaaaccggttggtcctgacgcaggctgtttaccattttaaggattatttcatcacacaacaattccgattgtaactgtttttctctcttataataggcttgcttgctatacccaaacaacgaacaacaatcagggatacttatttccggctgattgtcatgaagccttttcactgcttggtgccagagttttttcggatatcgatgttatagtgttcattggctagttctattaggatttccatcgcacggcgatgagcttgctcatgcttcagttccttctctttatcctttaactccaactctttttgtttgagggcgcgttccagttctttgatccgtttggaaagatccgattcgttttctgtcatttttattgatcgctttttgagtttcagtggttttattgacactgatgattgtctttttgcctcaaatttacgaatccaatgcgatattaccgtagggtcgcttatggaatatttaaaggcgatctctttacggcttactcctaagcgatattcacctatagctgctaggcgaatctccaaaggataaggttcacccttgcgacgagtcaatgacttctcttttttcatctttgttgacttttatgaagtcaacctatttcaggacgagacaaattgaaacggggaaccggtattgttctgaaagtagcgggaagtgtatctatatgtatttgtgagcaagttatttcgtcgacataaggtccttttttgcagaaaacaaggaggaaaagagtggaaagcaagcagaaatgttcggaaacatgcccatcttccggcattctacacccggatgttgacgttccctacacccggatgttgacgcctcgaacatccgggtgtagagaatcattacatactgacatgttgtaatgaagatgcttattatgcaagaaaaggctatatgtattccaaacattcttaatatgttactattagcttgcctgtaagtgtatgaaaaaacgtgttatttcgcacaaattatgtgcagtatcgcacatacattccgtatatataatacatatctttgtcacgtcaaggatgattttttacacgagatagaataataccaggaatatgaagaacgggaaaatattgattatagatgataacgaagatgtcctctttgcgttgaatctgttgcttgaaccttatgtggaacagataaaagtgacgacgcagccggaacggatcgagcattttatgtcgacattcgtgcccgatgttattttattggatatgaatttccggcgggatgcgatcagcggacaggaggggttcttttggctcgaaaagataaaggccgccgaccccgatgccgtggttctttttattacggcctatgcagatacggaaaaggccgtacgtgccataaaggcgggggctaccgactttattccgaaaccctgggaaaaagaaaaactgcttgctactctctcggctgccttgaaactgcgtgaaagccgtacagaaatcaatacattgaaacagcgggtcgaggcattaggaagccctgatgataccggctttgagattatcggtgagagcgatgtcatgcaggaattgtttgccacgattgccaaactgaaggatacggatgccaatattctgattttaggcgaaaacgggactggaaaggatctgattgcacgcgctctttatcatcattcgccccgttgcaaccaggtttttatcagtatcgatctagggagtatcccggaacaattatttgaaagcgaactgttcggatatgaaaaaggagctttcacggatgcacggcgcgataagcccggacgtatggaagtggcttccggcgggaccctgtttctggatgaaatcggtaatttgagcttgccgatgcaggcgaagttattgacagctatcgagaaaaggcagattctccgtctgggggctacccgttccgtgccgatcgatgtccggctgatctctgccacgaatatggacatccatgcgatggtacaggaaggaactttccggcaggatttgttgtaccggatcaatacgatcgagttgcatatccctccactccgcgaacggggaaatgatatcttgctgttggccgattattttctggattgttatgcccgcaagtataagaaaaagataggagggcttaccagagatgcgaaaacgaaattgcaaagctatgcatggccgggcaatgtccgcgaactgcaacatgcgatcgagcgtgccgtgattctttcggatggtcccatgctgagacctgaaaactttatgctgcatcctgcaccagcccaaaagaaaggggagccggaagaattgaacctgggcgttctcgaaaaagaagcgattgaacgagccctccgccgggcggacgggaatatcacgcgtgctgccgagctgctgggaatcacccgttttgccttgtaccggaaattggataagttgggcctatgaaacgatatctcctttttctgaagatcgggttgctggtcgggctatctcttttaattgcctttctgcttttgaaggaattgtattttacggctgtcatgtgttttataatcttgctgggaactgctttttccctttatcaggatcagcggaaaatgcttcagaagatggagcatctgattgccaacatccactatggagatatgaatctgtcttttcctatcccttcgacagacgggcccgaagccaacctgacgcgtgccatgaatgaagcgctatctgcttttcggacccgtctgtacaatgtggtggtggcggaggcggagacagaagcctggcaaaagctgatccgtgtcttgacgcatgagatcatgaattctatcgcccctatcatttccttgtcggaaacggtgacggaacgtgcgagttccaacgggttgaacgagcgggattacagcattatgttgcaagccatgcaaacgatacaccgtcggagcaaagggttattggattttgtcgaaaattatcggaaactgactcgtattccggttccgatgcagcagttgtttccggtttcctctctttttgacgatttaagggggctgtatcctgccggtgctatttcgttctctttctctgtccggccggtagacttgcgtatttatgcggatcgtgccatgattgaacaggtgttgataaacctgttgaaaaatgcagtcgaggcatgccaggaacgttcttatcccgaagtccgggtgaatgcgttcaggcgtgaaggtgttccggtgattacggtctccgacaacggatacggcattgtgccggaagcgatggataaggtatttgttccgttttttacaactaaacagggcggttcgggaatcggtctgagtgtttgccggcagatcatgaaccggcatggcggtagtatttccgttatttcagaagaagagaaaggaactactttcactttgcaatttccccagacgcgtgtgttgtaagggagagatattggacaatgatttttttcaattccgccggtttgatcggcttggccgcatatccgttgaagccgttctgctttactcgctgctcatcctctgaaaaagcaaaagcggttacggcaataataggaatgtcggagtcttcttttctgatttcgacagttgcctcatatccgtccatgtccggcatcttgagatccatcaggataaggtcggggcggtgttcgcgataaagccggacggcttcgttaccatcgtgggcatgcaataggtcgtattctttcaggaccgcacggatcagtatgtagttgctttcgttgtcttctgcgatcagcagcgtcgcttttttcggattcgtgttgtcgattatagcatcttcgtttatcgccgtttttatcgactgaacgtcaatgcgatgaatgacggtatccggcaaagtgaaccagaaagtcgaaccttttcccaattgggattccacaccgatctcaccgcccatttttttgacgatcatctggcagatggcaagtcccaggcctgtcccttgtgcaaagctgttcagctttacgaaacggttgaacacaagatctttcttctccggttctatgccacatcccgtatctctgacgtagaataacagtttatcgtctttatgccggtagccgaaccggatgcttccttctttcgtaaacttgatcgcgttgttgatgaagttcgtgatgatttgtgccaatcggttcttgtccgacatgatgatgcaataaggcattttttcgacaaaagaaatctgtaccccttcgggtgcttttaggcgggacgattgctcgatatcggataatagggcgttgatgtctatctcagagtcgataaattccaatgtgcctgcctcgattttggctacgtccaggatatcgttgattagttgcaggagcaattcattgttgctgctgatgatattgatatattcattccgttcctcttcgtcctccgccatggtcagcaggttggagaaaccgacaattgcattcagcggcgtacggatctcgtggctcatattggccaggaaagccgatttcaaacggtcggattcttctgccttgtctttggcttttctcagttctatttcgtcttctttctgtttgtcgatcaggatcagtaatttatttttcagcttgctggtgcgcaggtaaaagtaaagcaccatgatcaggaacagtaacaacacgattgcgaccaacaataggatttcaaatttatattggacgaataatcccacttcggtattaataaatacggaatgaggaggcagttcttttgtcgagatgtgccgttctttcagtttcttggcatcgaatgtatataggttcggaattgtttccgtgtccaatttttcaggatgttcctttaaaaggtggagagcctgacgggccagatcttttcctatggagcggtattggggtatacagcctccgattgcccaatgccccagcccgatggaagtcagtgaaaatgccggtactttgggatttgccaacatcatggtgtaagttgcgttgccgacatagtatccgtcattgacatctacacgccaggttcccagaagaatgatgctttgcgggggtaactgcttgatctcctcgatgatgttatagatgtcgttcttacgcccgtccaaagggatgaagtctatcccctttattttgccgatttccttttttaccagggcttggagagaaataccgccatagctgttgtctgtgataagggcaaaatgtttggtactcggatacaatttccggaccagttctatattggctttgatatcatagttgtagacgaatccagccaggtttcttctcttgtttttcaggtcttctacatttacactttcgggagtccattccgctacgtttatattactgtcaggtaataagacggcatttcggctgaccatgccgcaaagtatcggaatatctcggattatgctgtcatcttgagaaaggtaggaggcccatccttcttgtccgagtataacgatcaggttagggctgttttctccctgatatttgttcagcagtttacgcattctttccttccagaggggagcttcgggcaggcttttgcagttcatgttctcgattacgacaggcgagtttcccccctgtttcttatactcttccatgaattcggaaatattttgcgtcgtattgcgtgtgtcgggattgtaagaactgatgatcaggatagggttattttcatcagcatggacccggcatgtgaagagtaggcatatgacagtgaaaaaaaatagccatctgtacattactttgtagtctgatgatttgcccattaagtaaattttattctaaactcccaaatagattccttttgaatcccgcatgcaaaaataggaattatttggtataagcttgcataaatcaacacttttctaaaattcgatcataagtcctatgctgggtaatagggtcccggtacgtcgttctacaggttttagttcatatcgttgttggtcgagaggtgcgtccggatttaggattttacctgttttgatatacacatcctgttctttatatttggaattcagaatattctgaatgtcaatataggcccccaacatgaactttttcagatagaaggtcttgtctatccggatatccagttgggtgaaaggttttaaccgttcgctgttgaagcggctgtaatcgtaatagagactgccgctggcgtcccaagcttcgaccaggctacttttttcaacatcgtaaggggtatagggcgtaccgcccacaactcttagtttggctccgatatcccagtttttaggcagtgcgtaggtcccgctgaatgtaaagagatggcggttgtcccaagctgacggaatgtattttctgctcccgcgtccatccttgaattcgctccgtacataggtgtaagaagcgataaaggtcagtcctttataattataccaccgtccggtaagttcgaggccgtatgctcttcctgtggcggtcgagctgaccgcttcgtttcctaaaaccccgtagtccgtacctttagaggcgagtgaaatgctatcgactaatgacatcgggtattggtcgtatttcttgtaaaaaccttctgccgagaatttcagatatgaggaagggcgatactccagtccgagtcctgcctggtcgcttcggatataagtcaggtggttggctttattcaggtaattaccttgattgtctttgaatcctagaaccgtgtaaggtggcaattcgtaatatctgccgatgcttccgttcagatagaccgctccaaacaaacggtaggaaagggagagacggggcgagagttgatccaggaggttgttcatctccggcgaatagtcgttggcatccgcccgtactcctaaagaagcggtgaaacgctcgttgtcgctttcgtatatggctgtggcataaagcccccatttcaaaagtcctagatctgtgtgatagttgatcactctggggatcgtggtgaactgtttctggtatgtacgattggtgtaggtcgcatattcgaggtttccgccgacattcagccggaagaaaggaaaacggaatatattttcactgcgcagtttattttcgatttcgtccgaacggtaattgagagtcaggttctcttccgaactttcgtcattatccctgtatttgatattcttattgtttaactggctccggctgacaattagcgaatagatgtttttgccagagtaatgtttgtaaacagctcctaatgtgtatgtcttttgcttgaccaccggcaggtaggctaagatatactggttcttttcactcatgtcttccataccggtgttgagtttcatgtcgtctatggctcccaatcccagaatagccagttcgtttttccggtcgaatgtatgtttcactttgaattgtgcgtctgtgaaggtcggcaggaaaggcagtccgatcatgtcgaacaggaactgaaggtatgaacggcgaatagacacttggtaggtcgtcttcttgccggccggtccgttggcagagaatccgatatccgaagctcctatcattccccgtagggagaatttttctttgtttccgtcctgcaacttgaaatcaagaaccgagctaagagcgtttccacgcgcggcaggataggctgcagagtagaaatcgacttcgcgtatgaaatctgggttaatgatcccgacaggacctccggatgctccctgtgtggagaagtggttgatgttcggtatttctacgccatcgagaaagaaacggttttcagacggtcctcctcctctgaccatcaggtcgtttcggaaagcagccgtagatgccacaccaggaaaagattgcacgaccctggatatgtcccggtttcctccggcacttttctcgatctctttgaacccgatcacgcgcagtccgagcggactttctgccgtcttgcggaaaggagaggcgacaatgctcacttcttgtaggctttcactactttcttccagttcgatcggaaaaaacatgtccttgttggaaattctgaattcagccgtaactgttggtttataaccgataaaggaggcttgcaggcgatagcttccgggagagactccggtgatctcgaattggccgatcgaatcagtgacagtcccttctatcgtgttccagatgaccacattggcaaagctaaccggttcgccgttggcggcatcttttacaatcccttttattgaatatgtttgttgggcctgcattatttgtaaacccgtaaacatcaagagtaaaagaaagataaattttttggtcatctttgattcttgttatggttacaaaggtatataaaaaccgggattaaaaacttacctttgcaggcatattatagaaatacatgcagaacgcaacgaatcatatcaaacgggaattgcaactgacggcggatgggagccatacgctttttatccccgaaatggacgaacactaccattctgtgaacggcgccgtgcaggagtcgcgccatgtctttattgaagctgggttacaccatctggaacggaaagaaatcgtcgttctggaaataggtttcggtactgggctcaatgccttcttgactttgttagatgccgaggtacatcaacggaaaatacattactattcggttgaactttatccgcttgatatggacgtgatcgagagcctgaattacggcgaaatgatctgtgccggacggaaagatgttttccaagccttgcatcaggcggaatggaatgttgcggtccaggttacggatttctttggactgcataaaatacaaggagacagtaatacgtgtgctttgccggatcggatcgacctggtctattttgatgcgttcgctcccgataagcagccggagatgtggaatcaggaaatcttcaaccgactgtatgcccgcatgaccggaggcggtgttttgacaacctattgtgcgaaaggtgtcgtcagacgtatgatgaaagaagccggatattctgtcgaaagaatacccggccccccaggaaaacgcgaaatgcttcgcgctattaaattataaaagagcttctattttagatacgaatgtagttttaggagcagcacctacctgtttatctactaccttgccgtctttgaagaaaagaacggtcggaatattacggatgccaaattgtgcaaccacgtcgttgttgttgtctacatccattttgccgatagtaacacggccttcatattcggtagccagttcatcgatgatcggaccaaccatgcggcaaggaccacaccattcagcccagaagtcaaggaccataggcttaccagagtttaccaactcttcaaaatttgcatctgtaatttgtagtgccatatctttaattatgaattatatattcgaattttgtgcaaaagtacaaattcttttataccatacaaatactacccgttaattttaaaatccatattctcgttcgtttgcaagaattcgactaggttgcgtgtgacattaagccgtatgttttgtgagaaaaaattctgtatgacattatgttcgccgtcaaccaccttgaaatataacaggctctgacccggattgtttttaatcaaggtcgacagttcgtttatggtcggttcgtccaaatcgtggatcgggaccgtgatactgatcttttcgatcaggcggtctttctcttcctgcagcaattggatggccccgatagacaagctaaggcgacctgaattgtagcggtcttccacacgcgccttgatcagcaggtacatgccgcgcttgccgaatttgctgtaatcgacgtaatctttaccgaacaatgctatttcgccgctaccggtaaaatcttctatcttgataatgccgtaaggattcccttttttggtcatcccttcgcgaaagtccgtaacgataccgccgaacagcaagtctttgcctaccaggttttccttgtcgtttatttccgccatgccggtattacatacatatgtcagtataatacggtattcatccaacggatgggcggaaagatagataccgaccagttctttttctttatttaggcgttcgaggtcgctccaacgttcacatttgggaatctctggtttggcgatggcgataaaagcatctcctccgaacagggaattggtagccgtgctcttgtctgtctggaacttattgccatagcgaaccagtgtttcaaggaatatttctccttttccggtttcggcaaagaactgttcccgctggatgccgaaattgtcaaaagcaccggctaatgccagcgattcgatgtttttcttgttgcaggcagtcaggttgacacgttccacaaaatcaaagatatctttgtacggaccgtttttcctccgttcttcaatgatattctgcacggcggcttcgccgacacccttcacagcacccagaccgaagcggatgttcttattcttgtccacactgaacttcaggatcgactcgttcacgtccggtccgagcacctgaatgcccatcgccttacattcgtccatgaatttcgtgatatccacaatattcgataaacttcggctcaagacggcagccatatactcggacgggtagttcgctttcaaaaaagctgtctgataggctacccatgagtagcaggtggcatggctcttgttgaaggcgtatgaggcgaatttctcccagtcggaccatatcttctgcaaagtttcttccttgtaaccattcgtctttccacccgccatgaatttggatttcaggtggttcatcttttcgatcagcttcttacccattgccttacggagggcgtcactctcgccacgggtgaagttcgctaacagacgtgacagaagcatgacctgctcctggtagacggtgatgccatatgtgtctttcagataccgctccatgacgggaatatcgtacttgatttcttcttttccctgtttacgggcgataaaggaaggaatataatccataggtcccggacgatacagggcgttcatcgcgatcaagtcttcgaatttagacggttgcagttctttcaggtacttctgcataccagcggattcaaactggaaggtacctgtggttttcccgtcgcaatacagtttgtaagttgccggatcttccagactgatatggtcgatatccaggtcatggccggtcgtcagccggatgttttcaattgcttccttgatgatggacagtgttttcagtcctaagaagtccatcttgatcaaaccggtctcttcgatcaccgaaccttcatattgggtgacgagcatctcttcaccggtatctttgtccttggccgtactgacaggtacgacatccgatatatcgtaacgtccgataatgacgccgcaggcatgtacacctgtgttgcgcacgttaccttccagcatttgggcatatttcaaggtgtcgcgtgccagcgggtcgtttccggtagccgcttctttcagctccggcacataattgatcgcatccttcagcttgaacttcttcatatccggaatcttgtccggaacgagtttggcgaggcggttcgattcggcaagcggaagcttctgtacacgtgcgacatccttgatggccgatttggtcgccatcgtaccatacgtgatgatatgcgctacacgttcggccccgtatttttccgttacccaacggagtacttccccgcggccgtcatcgtcgaagtcggtatcgatatcggggagggaaatacggtccggattcaggaaacgttcgaacagcaagtcatatttgatcgggtcgatgcgggtgatccccagacagtaggcaacagccgaaccggctgccgatccacggccgggaccgaccgaaacgcccagttcttcgcgggcggcccggatgaagtcttgcacgatcaagaagtaaccggggaaccccatcgtcttcatgatgtgcaactcgaagttcagccgctccttgacttcgtcgttcagatcatctccgtagcaaatctttgccccgtcgtatgtgatctttttcaggtagtcggcttccagtttgatgcggtatagtttttcgtaaccgcctaatttttttattttgtcgtgtgcggcctcttcactcaggacaacgtttccgttttcatcgcgggtgaattcgtcgaataagtcctgttcggtgaatttctggcgatattcttcttccgtcccgaaatcttccgggatggcgaaggtcggcatgataggaccgtggtcgatggagtagaattccaccttgtcggctatttccagtgtgttgctgagggcttcaggaatatcagaaaagatggtattcatctctgctgtcgtcttcatccattcctgtttggtgtagcgcatacggttcgggtcatccaaatctttacccgtactaaggcagattaggcggtcgtgagcttccgcatcttccgcattgacgaaatgaacgtcgttggtcgcgataaccttgatattgtgtttacgtgccagttccagaatcgccttgtttgccgtaacttggtgggggtatacatcttgtgcggcgttcgggtcatgtgtctcgtgccgctgtatttccagatagtaatcttctccgaacaggttcttgaaccaaaggaccgattcttcggccttgtccatccgtccgttcaggatatgctgcggaatttccccaccgatacaggcagagcaaatgatcaggtcttcatgatatttttccaacaactccttgtcgatgcgcggacgtccgtaaaatccttccgtccaggataaggaaaccatcttgatcaaatttttgtaaccgttcaggttcttagccagcacgatcaagtgccatccgcttcggtcgttctgtgaagcaagcttgctatgccgtccgttacgggcacaatagcactcgcaaccgaagatcggtttgaatatttttttcttctcttcttcgatctttgcaggtatttcttcaaggcgggcttgctcttcggcggtcagttccgttttacttttcagctctttcagctctttttcatagtccttgatggctcctaacggcttgccgttttttttggataccttgttgaagaactcttttattccgaacatcacaccatggtcagtgacggcaatcgccggcataccatccttttgcgctttgtcaatcaaagcgtcgatcgatgcttgtccgtccagcagtgaatactgggtatgtacgtgcagatgtataaacggttccatatgggttcttaatcttttttatttcggcctataaagatacgggttattttataaatttattctatcggctgcaataatccggttgaaaaactctatctttgcttttaataactcagagattagcaatatgagaaaaattatatttatcgccttttgggcaatgttgatgattatgccggctgtcggtcaagttactttcggcgtgcgtgcgggtggtgcttattcttctctggtgcaaaaagttgaagggacatacaatgccggtgcccgtttcggtttcagcttggccggacttgctgatatacatttatataagggcttgtctttgcgtcccgaactggcgtttgtgaaccaaggtggttctttctactctaatccgcaggtggaaggggcaaagaattctttcaataaatgcagttactattctatccaggttccggtgaacttggcttatacctttattataaatgatgtgcagttgggcgtttatgccggtccggctctcgacttctctctttttggaaagatgaaaactgaaaaccagaacgtcgatatccatttcggccagaccaaggaggctgatctcaaaacatttgatctgggtgtcaatgtcggcttgcgtgtggattacagtcgctacttcttttccgtcagcgccctttgcggcacactggatcgtcgcgctatagaacgcgaaggcgaatcttccctctatcagaacaacgtgacgttgtcgttggggtatatgttccggtaaatatttattactccggcataccgaaaacgagatgatccttctttgtcatttagacggagaaaggatatatttcttgatgtaaaatattagatgctttttatgtccggtctatagcatctttttcctgaatttgacctacttgtgtaaattctttctacgaaaagttttgtgttttgcagaaaaaccgtacctttgcaagccgaatattatcaaaattgtactaagagtttaatttttagcacgttgttatgtcaagtgtccgtggtgacagcgcatgcgaggattggattcttgttttttagagttattaatttattaattttttaagcaagtggatactttaagttttaagaccatttctgcaaacaaagcaactgtaaacaaagagtgggtcattgttgacgccgaaggacagactttgggacgcctttgcgcaaaggtagcgaagcttttgcgtggtaagtacaaacccaattttactccgcacgttgattgtggtgataacgtaattatcatcaatgcagacaaaatcgttctgacaggtaataagtggaacgatcgtatttatttgagatataccggatatcccggtggacagatcgcttatacgccggctgacttacaggctaaaggtgacgaccgtctgttccgtaaagtagtaaaaggtatgcttccgaagaatcgtctgggtgctaaactgttgaacaatctgtatgtatatgcaggaacagagcacaaacacgaagctcagcagcctaaattaatcgatataaactcatataaataatcacaatggaagtagtaaatgcaataggaagacgtaaggcagcagttgctcgcgtattcgtaagcgaaggtacaggaaagattactatcaacaaacgtgatctggctaattactttccttctacaatccttcagttcattgttaagcagccgctcgcaaagctgaacgttgcagaacaatatgatatcaagatcaacctcgatggaggtggcttcaaaggacagtctgaggcagctcgcttggctatcgctcgcgcactggttaagatcaatccggaagacaaatccgctcttcgtgcagaaggtttcgttactcgtgacccgcgtgctgttgaacgtaagaaaccgggacgtcctaaagctcgtaagagattccagttcagtaaacgttaatcttatttgtgagtcccttacaagtatagcaaagcgtttagtatctaaattatcaggattctttttatatgctgacatacaggaggactacctgatgattgagttaaacaaaagaaagtaaacgattttaagaaaaaaacaatgtcaagagttaattttgatcagttattagaagctggcgtacacttcggacacttaaaaagaaagtggaaccctgcaatggctccttatatcttcatggagcgtaatggtattcatatcattgacttatataaaacagttgctaaagtagacgaagcagcagaagtaatgaagaaccttgcaaaacaaggtaagaaagtacttttcgttgctactaaaaaacaagctaaacaggttgtcgctgataaggcttcttctgtaggtatgccttacgttatcgaacgctggccgggtggtatgttgaccaacttcccgactatccgtaaagctatcaagaagatggctactatcgataagatgacaaaagatggtacatttgataatctttctaagagagaaaaacttcagatcactcgccagcgtgctaagttggaaaagaccttaggttctatcgtggacctgactcgtcttccgtcagctttgttcgtcgttgacgtaatgaaagagcatatcgcagttcgtgaagctaaccgcttgggtattcctgtattcggtatggttgatacaaactccgacccgaacaatatcgactacgtgattccggctaacgatgacgctacaaaatctgtagaagttatcttgggagctatctgtgaagcaatgaacgaaggcttgcaggaacgtaaagctgaaaagatcgatacagaagctgccggtgaaggcgaagctcctaaaagagaacgcaaagctaaagctgctgtaaagaaagaacgtactaagaaggaagacgacgaagctctgaatgctaacgttgctgacaaattcgctaaggacgaagagtaattcaattgacaattgaaaattgacaattgaaaattaagagaaacataaaatgaaacgatgggcaattggcttttgacttgaattgtcaattgtcaattgtccattgtcaattaataaagtaaatatttaataaataagaaaataagattatggctgtaactatggctgatattaccaagctgcgcaaaatgagtggagctggtatgatggactgcaagaaggctttgaccgaatctgatggtgatatcgaaaaggcaatggaaattatccgtaaaaaaggacaggctattgctgctaagcgttctgaccgtgaagctgctgaaggttgcgtattggcaaagaaagatggcgaattcgctgctatcatcgctttgaagtgcgaaacagactttgtggctaagaatgaagatttcatcgcactgactcaggctatcttggatgctgctgtggctaacaagtgcaagactctggacgaagtgaaggctttgccgatgggtaaaggcactgtacaggatgctgttaccgaccgtagcggtatcacgggcgaaaagatggaattggacggctataacgtagtggaaggcgcttataccactgtttataaccacatgggtaagaatcagttgtgtacgatcgctgcgtttaataaggaatctgaagaagctgctcacaacatcgctatgcagatcgcagccatgaacccgatcgctatcgatgaagccggtgttcctgaatctgtaaaagaacaggaaatccaagtggctatcgagaagactaaagctgaacaggtacagaaagctgttgaagctgccctgaagaaagctggaatcaacccgacacacgttgacagcgaagaccatatggaaagcaacatggctaagggctggatcacggctgaagatgttgccaaagcaaaagaaatcattgctactgtttctgctgaaaaagcagcaaacttgcctcagcagatgatcgagaacatcgctaaggggcgtcttggcaaattcttgaaggaagtttgcttgctgaaccaggaagatatcatggatggcaagaagactgtaaaagaaacaatgaaggaagctgatcctgaattgcagatcttggcattcaaacgctttactttgcgttccgaataattttgctacggcagtttgaaataaaaaaggagatgttttttgaaaacatctccttttctgtttttaggcacggatttcacaattgtgaaatccgtttatatccgtaggtttattttaaagcagccaaagcctctttgatacgtttgatagcttccacgatgttttcatcgctggtagcgtaactcatgcgaatgcattcgggggcaccgaaagatgttccgccaacgcaagctacatgggcgacttctaacaagtacatggctagatcatctgcattctcgatcgtgcgtgtaccgtcggttttgccaaagtaatagctacatttggggaacaggtagaaagctccttccggctgatttacttcgaatcccggaatctctttcgctaagccgacaatcaagttgcggcggcgttcgaatgcctggcgcatttcttcgaccggtgcttgtgaacctgtgtaagcagcttctgccgctttctgggatacggagcatggtccggaagtatattgtccctgcaatttgtttactgcctttacgatccattccggtccggcaatgaaaccgatacgccatccggtcatggcataggctttggaaacaccgttgacaatgacagtacggtctttcattccgtccacctgtgcgatgctgttatgtttgccgatatagttgatatgttcgtagatctcgtctgcaatcacgatgatttccggatgttttttcaggacttcggccaagcctgccaattcttctgcactatagaccgagcctgtagggttagacggggagcagaggatcaacgcctttgtcttcggtgtgatagccgtttccaactgtgccggagtgattttgaaatcctgttcgataccggccgcaacgattactggtgtaccttcggccaattttaccatttccggatagctgacccagaacggagccgggataatcacttcgtcacccggatttaccaataccatgattgtattacaaacggattgtttggcaccatttgcgcaagaaatctggttggctgtgtattccaatccgttttcgtttttcagcttggcaacgatggcgttacgcaaggccggataaccagcgacgggagaataacgagaatagttttcgtcgatagcttttttggcagcatccttaataggttcgggagtattgaagtcgggttctccgacacttaagttgataacatcaactccctgagcctttaattcactgctcttctgggacatcgccaatgttgcggatggcgacaaacttgctaaacgtgctgatacttgtgtcatgatagtgttattatgtaattatgaattatttgatattgtgcaagacgtgtcccatacgttcctttttcgttttcatgtagaattcgttgtaaggattcggagcgacttcgataggaacgttttctacgactgtcagcccgtatgcttccagtccgacacgcttgacggggttgttggtcatcaggcgcatcttggtgactcccaaatggcgcaggatctgggcaccgacgccgtaatcgcgttcgtctgcctgatgtccgagatgcaaatttgcatcgacagtgtccaaaccgtcttcttgaagtttataggctttcatcttttccatcagtccgatgcctcgtccttcttggttcaggtaaacgattactcctttgccttcttgctcgatacgttgcattgctttgtgcaactgctcgccacattcgcagcgcatggagccgaagatatcaccggttgcacaagaagaatgtacacggaccaagatcggttcgtccggttcgaacctaccttttatcagggcaatatgttccagtccgttgcttttttggcggaaagggatcaagcggaagtggccatactgggtgggcagatcaacttcgacgccattttctacgatcgattctgttttcaaacgatatgaaatcagatctttgatacagatgattttgatatcgaacttcttggcgacctcgatcagttggggcaggcgagccatggtcccgtcttcattgatgatttcgatcagtgcgccagccgggtataaaccggcaaggcgtgccagatcaacagctgcttcggtatgtccggcacggcgcaacacaccacgtgaacgggcacgaagcgggttgatatgtcccggacggcccaggtcggacggtttggttttcggatcggcaagcgccagaatagtttctgcacgatcaaacatcgaaacgccggttgtacagccacctcctaatttatcaactgttatcgtgaaaggagttcctagtaaagaggtattatttgcaacctgcatgtccagttctaattcctgacaacgttcttccgtgatcggtgcgcacaatacgccacgaccgtttttcaacatgaagtttactttttcaggagttatcttttcggcggcaataataaaatcaccttcattttcgcgatcttcatcatcgactacgattaagaattttccttctcggaagtcttcaatagcttcttcaatggtgtttaatttgatttcgctcatatattattttacttatatttcttattttacaaagatacaggtaatttttcaattatatcaatcagttcatagcttgtcttttgtaccatcttgatatcgtgccgtaaaagtttacgctgatacgtggcaagcagataaaccgggaatccgatcgggaaaaagaggctgattgccagcccggcttttccatttatttttgcatttgtctggttgtaaccgttgatgaccggatagtccatcagtttgttcagaaccaagttttggtccgaattagacaattcttcgatgatcccgtccatttttactgctaattgttcggccgtatggtcacgacctccctgtttccagaagagaaaatagtttgtccatcgtttatgggcggctaagtaggcattgctttcttctgccaactgtttcaggcggagaatgatttgcccgtaatccggattgaacatgatcacctctttcatttcaacttttctgcccgaacgttttccgaacaggttttttaaggcattcaggtatgtgtcggcattcaggatgacggagtcgttgaccgctttataagtcaggaagatacctaacggagccaaaattgcggaacttagccacatcccttgccatgcttcccatacgccgtcgcgcgccattttgaaaccgatattgtcaatgatgtaatagaaaataaacagtatgaccgaaatgacgaccggcatccccaatccgcctttacgaatgatggctcccaacggtgcgccgataaagaaaaagaccatgcaggcgaaagacaaagtgaacttcttgtgccattccgtcaagtggcggcgtaccctgtaagcttcgtctccgatagtggctgctttgaagaagtaatcagccttcatattttctatgctcgatttcgcacgtgtcaggatagttgccttctttccgggattttctgcctgatagagactgtcaaagttcatgacaattaccggctcgtccgttttgggcgtctctagtgtcgtttttgtatctgatttttcactattcgaatcatcctttacgttattctgctttatgtcttgcggcttctttagtgtctttttgtatgaggtttcgtaaacatttttggcgttgacgttttgtatgctgtctaagcgtacggaaacagaatcgatgaagatttgtaaatcatgcatgtttttacccataaactggttttgcatgaatgattcgtccgtccgtgaaaagttggcatcaaattcgatcaggatatcccggcttttgaatgtctccctttggtaaggaacggaactttttgtacctgcggtactcggttgcttgtccaggcttctaaaggattctccattaaatagggaaaggactaagaacattttgtctgccgatgtcttcaggcgtcccgaatctgcgaccatcacgcttactttgttgaatccttcagaataatcatagatcatcatatcgcgaaggagccccgtttcagtatccttatgcttcacatatacattaaatccagtgatttcgctgtaaaaaaccccttcaggaatatctagctccggcgatttctgccgcatagaccaaagtagcgtgtaaagtttgacttgtacgacaggcatggcatagttctggaagaagaaagccccgatacttataatactgatggtgatgattagcgggcgcatgatatggacaagtgagacacccgccgatttcatagccagtaattccaatcgttcgccaagattcccgaaagtcataagcgaggcaagcaaaatagccagtggtagtgccatcggtacgagaaatagggcggcatacataaacatttccgccaaaacaggaatccccaaacctttcccgaccatgtcgtcaatgtacctccacaggaactgcataagcacaataaacagacagatgccgaaggtcatcaagaacaacggcaggaaagtctgcagcataaatgtgtataatcgttttattttcaacattgcttatccggttgacggcgcaaaagtagtgaaaaaacgatatgatcgctaacagaaatcactaaaacaagctaaataccgagtgtacgtttcagttcttctacttgcgtgtcccataaatcgatagaatcctttttttcatcttgttcggcaaaatccgttatttgtaaagaagtcgatcctgttaattcatggctgtggatctggaattcgaaataggcattttcatcctcttcatccatccaacggtaacggatgctcatttccggttttatagacagcacttccgcttcctgttcggctttgttccatttaaaaacatatatgctaccattgataataacatcatcggcgaaccaagcggatagtcctggaggagttgtgaggtgattccataagcttcgtcgtgaaactttatcgaaaatgtattcgatatgaaatttctcttttttcatctttcatcgtgtttattgcgcagcaagataataaaagaattgatatttgccaaatctgttcgccaaaaaaaacaactctgaattaagatcttaacaggaagctttcaaaataattgaaatttttttcatgaaagtgttgcacaatataaaaataagctctacttttgcagcgtcaatcaagaaaatgatgacatttgatggcgagatagctcagctggttagagcgcatgattcataatcatgaggtccccggttcaatcccgggtctcgctacaaggaaaaagacttcgtaaacgtttggtttacgaagtctttttccgttttatctggtaatcaaaaacaagaaaaaagtccaggttttctgttcttgtcaaaaagaagcagagagcctggacttttatgataattatgtaacctcacggttatattaattaggtttgcttgcagaattaagggattcgtgcaaacagagtatagggtaaaatttcacaaattgtattgtgttatttcttgctacaaagttacgctatcaatagtgtttatatgcgtggcaaaaatatcatacgggcattgtactcatatcattcgtgataatgtaaaatgcttgtaatcagatgaaatatttattaacgattgtatttgtatcatattggctggtattcctatcacggaggatcgcatatttataaaaagtggtgcacactcggaataatccgaatgtgcacctattgcatataaaaaattgagggtcgaattatccgactgtaacatactgaataacagtaccccattctgaaatgctaatattgatattgttgcgggaaaggtcaaaaatgatatttgtttgttctccttcgtttgcagccacgttttctgaatttttgacattttcggaagaaagaactaaaacgtcatctctgtaaagctctatagtcatattatcagccggtaaaatggagaatgtacctgtggttaggttgccattatcatttaaagtagctggaataatatatccgatatcattgcctgtcaattcaccattgcagttgaatgagcttttagttcttttgattttgtaataataattgccttctttggagtcaaatacctttaaagcaccttttgtcaagatcgacatggaagacaccttgcgttcgatctttaattcctgcgaagttgcttttgtagaagaacgatgtagaacgatttgtccataaaacaagtctcccggcagattgtttgcaacgccattattgtgttttaggctcacttgcaggtctgagatgacgtttgcctggttcatattgctgatttcttcgctattgcttgaaaggcctgcccaagcgatgacggtgatcttgtcggatcccggacagtttatttcgaccggcttaacctgtaaaagataatcattgtccactgtgatttgtttgtagaaatcgttattttcatcgaaaacatacagtgtagtgctttttacgtcccctttggcagtgatgtccgaattctcggagtatgctttcaagattatggaaaaaggtgcttctgtttccagtggaactctttcatctatgattgaaatggaatcaccatcggaagagcaacttgcgaaagatagaataacggacaatgtccaaatagaaaacaaacaatttgtgaaaattttaccctttttcatgaccctaattttttttatatgctaattaaaaccctatactccgaaagaacatttgtaaggttaagaccctcatcaaaaccttcgtttctttttttcgatagtgcaaatgtatcattggttttcgaataatacaataattctgtatgtaaaatatgttaaacgaatcaaaatggttggagaatatctctttatgagggttgtttgtctcatttttgcatggtaaaggtattaattatcattcgttattgaaaggtctaccacttttctagaggcaggtaaagtgtcatgaatgtggttgattctgtcatgactcggattttgtttttagatttaccatttcgctggtaaatgtatcagctgagataggtgaaactattggttctcccttgaagttggtgattgcctatgttgataggttttctgaatattcataatataatgccccttctatgtcgtgtataaaatatgtacgtgcataaaacaggcaaaaaaagtggcgcacacgcggaacaatccggatgtacgcctatgcatataaaaaattgagggtaaaataaatcaaatgaaatattttattgatggacaactcatttagagaagcttgttttgaaaagtttccgatactatgagtattgataattaatgattgtttgctatgaaacaagctgcattctataataccttaatttggaaccgataagcctcgtctgaatctctgtccattatttttgtacaaaaataaaatgtctttttctgttctacaataatacgtgcgtaaaagatgttaaacgtgtcaatgtgtaggtattcgtgtcatgttctgatggggaagagttttttgatgccctatttttaattgcgtctatcggatgaaatttggatgctgtcatgtttttgtaacgattttgtatgtttaaaaatatatgattatcatgatattttttgaaaaatagttggtgttaaatatctcgtaagaaaaatatttttgccatctttgtcgttcaatgctgacgatgagttttgatttatagaaggatatataataaatgcatataaatatgaagaaaaaatctctgttcaagagggtgagtggagtattgacaggtgtttttttcagtacttcatttatcttggctgccaatgaaaacggacaactattcggaagtgagacattgattgtggtggttgctctactgcttttatttgtccccctgtttctttatgtgagaaaattacattccaatatgaatgatcgctcggatcggatcatcaaggaaaacgccgcacttgaaagtttgaataaagaaatcagctcccgaaacgaagaagtgaatacccgcaatgaagaacttgattcccggaataagtcgttggaagggcaaatcgagcaacaggaagaaagataccgggttttacgggagcagaatgacgatttggcgaaagccaatagtgatttggtccggaagaataacgaactggagttggtgatctctacattaaacaataacaagaaagagttggagcagctcatcgtaaccaagattaaggaaaacgacatgatccagcgtgaggctgccgacaagcttgccgaagcggaaaaacgcctgaaagacgctgaaagcatcaacgacaacttctttatcgagacgatccacgaaatgcgcaccccgctttccttagtgttgggttctcttgccttggtggtgcagaacgacgatccggagaaagatatgtctaccctgttgctttccgcttatcgtaatacacttgccatgcaggacttggcggaccagttgatcggtacgcaccgttcgaacgatgtcgccaattatttgcgcatcgcccgttacgatatggtcgagattgcccgccagatctgcgatatctttgtcgattgggtagccatgaacaacatcgatttccgtatcaacacgcagacgcccgccctttgggtctggatggaccgccgcaagatggagttcgctctgcgtatgttactgtcgaatgccttcaaaaatacgtttgtttatgggaaagtgacactcgatatatctgttgtaaatgaaaacggaaaagcctacagcgcactggttgtgacagacgaggggttggatgaagacgaaagtacacgccgcggcttgaagcagatcatggacatggctgatgcgataggcggtatgtaccgaagcgagtcggacaagaacggcacttcctacataatcatgatcccgcttggcaagcagcatctgttggaccgtcgtgtcgagtttgtggaacccgaatccgacctggtcaaactgaatgcccgccagaaagaagagatcgccgaactgatccatgtgattccgcaaaagaaggaaaccggaaagaaactccttgtgattgacgacagcgaccagatacgctggttcctgaagcatgtctttaataaggaataccagatattggaagcccgcaacggccaggatgggataaacgtcgctttgaaagaagagccggacctgatcctttgtgatgtcatgatgccggtgaaagacggctacgagacctgccgtgagatcaagaacgatcccaagatggcgcagacacctgtcgtgatgttgacagccaaagtcgagagcgaagatgtgattaccggtatcgaagcgggtgctgacgattacatcacgaaacctttcgacgtggaaatcctgcggagcaagatcaacagcctgatgaagaagcgcgacgatatgaaacgttacttctctaattcttctgctgcttcgcacaatgaagaaaacacgctgtcgaccaacccgttcatggatgccgttgtcaaaaacatagagaaacacctcgatgactctacttttgaggcaaaagtgctggcagactcattgaatatgagtctgccaaccttgtataggaagattaaacaatactcagatctgagtatccttgaactgacacgcaacataaggctgaaaaaagccgccgaactgcttgccagccagcaatactccgtacaggaagtcgccgaaatggtgggatttaacgatacggctacattccgtaaacgttttaccgagcaatacggagttacaccttcacaatacggaattccagcttaaggctggacattccgtctttccggacaattagtcgtactatattcctctcttattcttgttctataataagatgtaagcaccataaaaactgaaaatatctcaaaaataggtgcaaataaatcaaaatagtcacttagagttttaccgattatatttgagagtcacgcccctaatgcgtctttactttttctcccacctttgcaatgtcgaaagacgataacccgaaacgatgagacagataaagataatattataaatggtatcaataaatatagtaaagatagttagccgatgggaagtataggacaacataaaacacaacaatcgttccgaacaactcagcaagctatagggtaagaaaaataaagatcattatataaacgaatttattaactttttaattttgaaaaatatgaaactaagaaatttaatgtatgcaacaatgattgcatgtgcgttcgcttcgtgttcgaatgatgatgtgccgactccggataacggtaatcctgatgcgcagggtgggacaagtttgaccgtgaagtttgacaaagcagctgatacaaaagcatctggtgatattacgtctttatccatgttggtttttaatgcagatggcaaactggaagttgtcggaactaaagtaaatacacctgctgtggaagggggaagtgatgccgttgctcatgctgaattgactgctggtgttaaagaggtggctttgattgccaattatacagtaccaacaaatttgataggagaaacaaaagaggaggtttttactgctttaaataaaacgtttgattctgaattggaagttggtgcagctcttacaatgaacagtaaaatctatactggtgtggttgttgctgctgaaaagaagaatgtatttggtttcacaactgagcctactggttatgtaaatgtagaaggcttgtctgacaatgatttgaaaaaaccggtgaaattgtatcgtaacgtggctaaagttgtgttgaataaaatttctgcgaaagtgacaactgatgaaaataagcctaaatattcagatcctcagttggatcttaaagaaatctttattcttcagggacataagaaaactaatttgatgggtgaggactggaaagaatatggatctacaaatgtagaaaatgaatggtatagtgcttatgagcatacgactgattggcttaacaaggatgacaagtatacgcttgttgataatcctactgtcccagatgggactccgtcttggattaaaacaactatcactggtacagttacaacttcaaatgcttatgagacagtaaacagtttttatgtgtatgaaaatacaaatttaaccaatagaacactgttggttgtgaaaggtgacttctcttataaaatcaatgatactgatcgtaaaacagagagcgatcgttattacacaatcgctttaggtgaaaatttccaagtgtcagctggtgaaagcaatgtcgcttctgagcttttgactctgcgtggagtaacaggaaatgatggcaaatacaatggtttgtatcgtaacttgcagtatgatttgactttgacagttacaggaccgggctatcagactcctggtggtggtggcgatcctacaacgctggatgtacagtgcgtggttgttcctttcgggtatgttagtcaagatgttgaaatctaatcatcatttataaatatagaaaaggggctgtccaaaaagtcggatagccccttttgctattgtttatttcggtaaaaagtattatcttaccgttgcaaaaaccaaacattatagcaatggctaagatagtatttaaagagttaacatccaaccaaaatgtactttttccggtcagcttatcggaaaagatagctcccaatcatcccgttcgtgttgtaaacagtgttgtagacgccttggatattagttgtctgctctgggcatataaaggaggaggtactagcagctaccatccccgtatgatgctcaaagttctgttttatgcctacctgaacaatatctattcttgtcgtaaaatagaaaaggccttgcaggagaatattcacttcatgtggttgtctggtaatagtactcccgatttccgcacgatcaatgatttccgtggcaaacgtttaaaagaacacataaaatcgttgttttcagccattgttctgctgttacaggaatccggctatgtcagtttggatgtacagtatatcgatggtaccaaagtggaatcagcctccaaccgctacacttttgtctggcgtggtagcgtggaaaagaacaaggtaaaactggagtcgaaaatacagtcaatccttagtgaagttgacaaacatatcgagcaggataaacaggaaaggacaccagattgcttaccggatatggattcctgtggtttgcgggaaaaagtgagcgctttaaacaaacggctctccgggatgaataaagctgagcagaaacaaatcaaaaagttacaggaagaatatctgccccgccttgccaaatacgaatcgcaattagagaaattaggggatcgtaattctttcagtaagactgatgaggatgcgaccttcatgcgtatgaaagaggatcatatgaaaaacgggcaattgaaacccgcctataacatacagattgccacagagaatcaatttattaccaatctgggaatttacaggcgagccggagatacgggaactttaatttcttttttgaaagattttcgagagacttatcataggcaatcctctatagtagtggccgatgccggttatggaagtgaacaaaactacgagtttatggaaaatgcgggtatagaggcttttgtcaagtacaattatttccacaaagagcaaaagcgtgcctggaagaaggatgcttttgccatacagaacctttactacaaccgggaaagggattattacgtatgcccgatgggacaacatatggagtataaaggtcaaaagaaaagtaaatccgatttgggatatgtatccatactgaagcgttatcaggcacaaaattgtgaggggtgcccgctgaaatctcaatgccataaatcaaaggccaaccggatcatagaagttaactataaccttaacaggtataaacaaaaagcacgggaaagactcatgagtgaggaaggtatttatcatcggggcagacgatgtatagaaccggaagctgtctttgcacagataaagcataactcggcgtggaaccggtttagattaagagggttggagaaggtaaaaacagaatttaccctggttgctattgcacataatctcaggaaactggctaaaaaagtcagttttcttttgttttttacttatttctgtaggatgacttctcgaaaagtaataattgagaagaccaaagatattttaaatataaaaatggataataaacgggctgcataacaaaaaaagaaggctgccttttcagacaccttctttttagtttatagaaaggaggtatttatggcatctgttgcacaaacctatgcaaacctatcaaaacgcctgtgtgataggtttatctattaataaagagagtgacacctattcttaaaacacgcaaagctaaatacttttgtattgtataaatcaaaataagggataaatagaaattaataaaatatacatatttatgaaattgaagagttattttcttttgagtatagtggtagggatgacatttgcgtgttcatcagacgagaacgtcccggaggtggaggtttttactccggatgcaactttgtctttggctgctgttgcagatgggaaaagcttgactaaagccggtgaaggagagggggaaaatattgatcaggaagatgctattaatagtttgcatgtgatggttttttatgctgatggaaacttgcaaattgataaagtggttgcaatcaatagagtggaggatttggatgtacaaagcggtgctgtcaaaattcttgtattagcaaatgctggaacgcgggaaaaacaatttggcacattaaaggaagcattagtatatcagagggcattagataatgagaatgaaaataacggatactctatgagcagtcggttaatcgaggctacgttagatgagggaaagcataatatttttggtgaaataaaagatttctccggtcatatgccgaatgtatcaaaggacggaaataatattaaactgacacgccacattgcccaaatcaacttgaaatcagtttctgtgaaatctgataatggaaaagcttctttcgtcattgactctgtctttatggcaaatgtgaaaggctattctttgatggcggccaattccactgaagaatgggggatggtggagagcaaaggagcaccggaaggtaatttcttatggtggtacggccaatatgaaaatgaatattggaatggtgaatacaagacgattgaggatggtttgttgaaggctgatttgttaggctttaatgctaataaacggaaagtgacctcttcctctccttggaaaccagaaacaggccaactcgcttgtggcaaatcatttatcgtatatgaaaatatggttgatgccgtcaagcccggacaacgtactttgttagtgttgaagggcacttatacagatgataacggcagagtagaagagaaccgtttttatacgatccctgtcaatgcaatggggacgatgacaaatgctgaaggtggtacacctgaccactcttacgtcaaacgcaactaccgttacaacatctccctcaccattaatagcagtggttccgaccggccgtatgatccggtgactgaggcttgtatggatgtggctgttacggtggctgactgggatgtgatcgagcaaaatgaagatttggattaatagggtaaaatgaatgggaataaaaaacaaaacgttatgaaatcaatattgacaaaaaaggttttatttctggcacttgtcgcagttacggtctttgccaccggctgtatcaaggaagacttggacgagtgctataagctgacactaaaggtcgtgaaccacaaaggtgatgatatcacggctttgagcgttgtttcggaagccaagctctttatctacgataacaactcgaagctgcttgatacgcgcgatctcaacgatgcctttatcagaggcaaagaaaccattgagttgaactatcccgaaagttcgaaactgcacctgatcgcatggggaaacctcaaaggacatcaggacgtgaacgaggccaccaaggccgaagacttcgccgtttctctgaagagcgaaggcgagatcgcacaatctcccgacagcatctttttcggcgatatcgatgtgacagtacgcgggaacggtgtggctggcggaaaccaggaaatcgtgctcgaacccaaaaccggaacggtcgagatgagaacgcttaaccttcaatatgccctgacggcaagagggctgcgtgcgaccgatgaatgcgatttttatatggaccgcaccttgaacacgatcgactataagggcgagttgaccggcgacagcgtctactacaaccccgaagccgactggaaagactccgaatgggaaacgacaggaccgcaggcgctctatttaggtcagaatatgaccggaagcatacaggtcggtaacgaccgttacgaagtgaaggaaggaactttcgacgacggtacgacaggcccgatcgaaatccatccgttccagcgtacattggtactattcgcatggggcgaagacggcgccttcttaggcgcaaggatcaaagtgactccttggggtgttgtcgatgatgatattgaatggtaataagaaacgaatgctaatatataaagacgaatgagtatgttacataaaaatataataaagctggcagccctcctttggtgtgtgctgacagtcgcttcgtgtaccaacgaagatttcgataaaggcaacaacggtccggatgtccccgaaggtctgccggtgaccttgaaactgaatatcggagcacctgatgttacggtagttgaaactaaagccttagataatggtgaaacattcggacaaatagatgatttggcggtacttgtgtataacgaggcagggggggatggaactgttgcttattggggaaaatggaatgatgaggctgaccaacggacagtggaattttcaacaaaaacaggtcgacataagatatatgtattgacgaataccggctcccaaagtgtagcggccgaatatgccactgaagcggatttgttgaccgcacaatttcaagcaagtcagggaccgacaggtaaggagatgatgttaggatttgttgcagagggaacagatgcgtctaagagtagcgaaatgtacgaagaaggaataaatacaggtgtcaatgtaacaacggatggcgcttcttattgtgcacgggtcgtaccaccttattcaaaggtgacattcagaattacgaaaaatttgccggatatggataaggtttatctaaatatacatagtgtaaaagtccgtaagttgccaagtgtctatacccttatgccattttctggtgaaggtgacaataagttgacaccgaagcaaacagttgctgctgatattgagtttgatattgacgaggttcaaagtgataaaggttcttattttcatatgtatgaaaataaacaaggtgtttatcccaatgaaaaaggagccgcttataaaagtccgggtatagacgtgcctgaaaatgcagatgcggtagattatgatacttggtttaagaaatgggatgatctggcttgtacttacattgaagtaaagggtaagtattctattgtgaaaagccagacttcttcttcaacaacagttgatgccggtgatattaattatcgtttctttttgggtgaagatattacttcagactttaatatctgtagaaataaaagttatatagtgacattggatttcagccaagaagccggatatggcgagctgaaacatgagtggcgcgtacatgcaaaattagatgaagcgactttcctgccggaaggagatttagtgattgacggttatccgcagagtcttggttatgtccctttttatgtgtctaatggaacatcagggagcattacgttgacaactactggtgtttcgtcggctgatatgaatatgtactttaatcaaaatggatattggagtggttcttctgcagctgattttggcaattttaaaattactgcaaattcgttgactgagtttgctattgcaccgaatgatgtcggtattcttggtgaagggcgtaattataatcagggaagtttttcttctgcagataatttaaataggagagatgaagttgcgaaaggggatatttataatacgcgtgagtataagatgacttttataaccaatgaggaaacaaaaacatcagtattgatggtaaaggaacttcctttgttgttgttaacaaatacttatagtccatccgataaatcaaccgtttatgcccgtcgtgttgatggtgcatatttacatcctaaagaagttgaaggtggatattcggatggttctcgtaatgaatattttagtaggactacggataaaattagagcgcagcgaatttgtatgggaacaggtgattatcaaaacccatatgcagcgacaagtattggtaattatttaaaatctttcttgccgacaaaagcagaaatagataaaattattgagttggagaaagcaaatccgttgaaagaagcaaaatattggacgatggatggattgtatgatgttacgactaagcagattgtttctggcaaaggtgaaggatatattcgttgtgtggcaagacctctttaattaataaacattatgattatgaaactatcaaacatattcctctcgaccctggcagtactcctatgctgtactgcttgctccaaggatgaagaatcatttaaggggaaggatgcggatgcttcgttgagcattgcggtcaaggcggcggggtcggccgtaacgaaagggtttcacccgaatgatgagaatgagttggccggagaggccaaagtaaataacctttcggtgctcgttttcgacgaaagcggtgcacaactgattggctatggctggcaggcaaccaactcggaaggcgaggcctctatcctgaacgtgcctgctatgaccatgcgggcgcagatcgtgatcgtttccaatacgccggaaaattcgcttgccggtgttacgagctattccgatttcgaatccaagctggcacaacttgccgaccagtctcagagcaacctggtcatgagcagtccggtcattacgacccaagcgcctcttgtcaagggagacaactatctgggatacgcatcgatgggcagtgaaaatatcaacggtatcgccgaaccagtcgaaatcactcgtcttgccgcccgtctcgacttggtcaatgtcaagaccgattttacaaaaacacttctgcgcaatcgtacagtgagagtggaagaagtcacgatattgaaccagagcgcggcttcacgttttttcagccgtgattattggggagtggtgatggcaaccggacacctcggcaacagcgatgcgacagctttgaaccgcgatatcgccaatggttctccgataaacgacacaccttatgtgcactacgtgatggaaaacgatggctctgaagccccgacagaaatacaggtcagagcaactttgcttgaaacggacacgtatgaggcggaaacaaaaatattcaccgccgtaattaaccggaacggtctggacagaggatataatcacaactacgttaaacgcaactatgtatatcgcctgaatgtcaccttcggagataccagcttcgatggcgaccacgaaaaagatcccaatataccgattccgccacggccgactaccggagacctggatgtacaagtcgaagtggtcaattggggacaagtgaaccaggatgttgaaatctgatgatggcaacacatagggtaaatatttaaagtagaacaaattaaacgtattataattatgaaattaagaaatttatttttagcttctttggcagtttgcacaatggcatcctgctcaaaagacgatgacggaatatctggtccgcaggaggtagacgcttatctctctttcgcctccacaaccgatgtcatgacgaaggcatcgaccgaaggtgacgctgatgccggcaacggcaaagaagccaagatccagtctttgacggcttatgtctttgacgaagccggaaagtatgtgatcagtaagcatgtcagtttggaaggttccggtacggtaggtgaggactataatgttactggagaaggcgaaaatcagtccatcacctcaatcaaggctatccatgtgaaagtggcaaaaccgactacagaagggggaaattcttctacaacctttaaagttgttttgttggccaatacggagcattataatgatgttaccaagttagtggatttggagggaaagacaacgaaagacatcagatcattaaatgctgtaggagtaggaaaatcttatttgccaatgcacagtccagagttgactgttggaggtttaaagccttcttccgacacggaacatttcataaattggtataatggtgcttcttcttgtacaccggaaaaagtaacagcaaaggacgaccatacaggaagtattccagcagcaggtgcgactaaagtaataatgactcgctccatcgcgcgtgtgcaattggtttctttgaaggctgacttcagcgcattggaatctgatggtaaaacgataagatttgatgttacgtctgtgttcttggccaatgtccgtgctaacgcatcggttatgggcgaagaaaatacgggagccggtttctacagaggagcccctgaatcgtttgatgaacatcagtttttgattgcattgaatagtactgtagatgaagcattggtggctacatattccgacaggtcattgactacggctggaaacgctttgccaggatgggattttgacaaatatatcaatgcaaatagcccggaaagcattatgggtattccattcactgctaatggtgatgggtcttattcaaaagaagagggtggcgcttaccagacccgtttgattattgccggcaactattatgatgggaatcaaagtaaaggaacgagatacttccatatccctttgaagttggttggtgatgccggtaatgttgcaagcaacaagtttttcaaggtctcggcaactatcaccggtgaaggtagcccgaatccggatgaaatcttggaaaatgcttgtatcaatttcagtatagaagtggcaccgtggaatgtggtcgagcaaacagaagatgatacgaattaataaaatcattgattcacaataaccaaaggggacgtttcaaaacggagggcactgaaaaaggtatcctcttaagatttaatcccaatctttaaaaagacgaaagcagattgtattagcctttatatcggttttgcaatctgcttttatatatcttgataggagtttatattcggccttgtatagtcagtaaggccatcatattatacgtgggtaatttttataagtgttttttagcttagtttcaatattctcttgatatttgcggcaaagatggtcatagcaccttgcatctgcataccatccagcccatacgacagtgccttatcataaccgtatacctgctttaattctgcattctttgcctcaatcttgtatctttgacgagctatatctttaaattcttgtgatttctggaatccaagctgccttttctgttcttcattcctgataggtatactataggtcttgcttttagccccctccttttagcatccttctcttcgtgaacaagtcttgcatttctctatatcaaagaaataagtcatggattgattccatttcccatcctttttcccctgccttgcttttctgattgccatatgaccggcaggacaaacaaacatgcctgcatccttgttataatcaaacttgtcttcatctttcctgagtccatgacttatggccggatgtaattttgataccaaagtaaatcccttctcttcatcttctgccagtctaaggttttccgatccggagtatgcggtatcaccaatgacagtgttcacttccattccgttttttctgctttgctccacaagctctttcaactgaggcccatcgcccttttcgccagaagtaacagtagcggctgttatgatacgatcatcactcattgcaatgtgagtcttatatccgaaaaacgaactgtcctctgttttatgaccaatgcgggcatctgcatcctttgaggtcgtatagtgatcctctatatctgaaagcgtttccttgagcatgttaagtcgctgctttactgcaggcacttctgaaagactggcatctgaagtgataagtttcagaaggtctttggtataatccaactcatgcgcaagatcatcctctttattcttagacggcagggtttgcgtgatattatcatccatggcataaagtaccttacggagttgctttgaacggagtcgcagaatctctatcggggagtacgggttagacctggcttctgtatgagtagcatctacaataatagtccttgattttatgatgcctttctctatcgctatttctacgctcttctggattagcaggttcataagatccatgtcttccagccgtaacttgcggaacttacaaagactgctggcattaataacgtcttcctctggagccatgccaaggaaatacttaaaggacatatcataacgggaacgctctacgacatctacgtcagaaatatcgtatatggtcttcagcagaagatacttgaacatgcgaataggggattctgctgttcgaccattatccttgcaatacttattggcaagttcctgatagacaaaagtgaaatctacaagatcattaatgcggcgaagaagattgtcttgggggacaactatatcgtagagtgaactatattcactgagcggaagttcttgttgtggtgatagcatggaccttaaatattatggcattaaggtacaaaaaatctgcacatagccaaataatatacaggctatgtgcagatttaattctttaaaaagctgcaaggaaactttttcagtgccctcttcaaaacgcccccttattttttgtctattaaaagaagcttatcgtttctatcgcaattaaagggtgtacctctcaatttgccttttggtatttttaccacttaatcttgaaagtttcgcctatcgcctcctgtcggcattccctgtacatttgcaccgtaagtcaaatgagaaaatacataggattatgaaaattaagaatatatttttcgcagcaatattggttcttgccggtttttcctgctccatggaagatgatgctatcatgaatgatgtagagaagggtattgaagaagccacggaagcttatacagtattggacttcggtgtcgcttttaatgaaatggctacaaaagcttcaacaactgttgttcccggtgaagacagacctgcaacaggtgatgagaacaatgacgaaaaaaagatatctgaagtatctgtattcttattggaagatggaaaggtaataggtattttaatcccccaaaataggaatcaggtaagttctaatagtgatggttctatcactttgaaggatctgaagtttgtgacgaagtacaaaactaatcgtacattggaggcccatgttgttataaatggtaatcaatttttgaaaaatatcaatattggagatgcacaaagtgctttgaatcaacaaatatccggatgtctttctgcggatcaactaatcaaatatggttctacgcgcattgtttttggaaaagatataactaattcttattcatctccgtctgttgcggaaaataatcctacgaccattcttgtgaaggtatcccatgtggctgcacgacttgacttctctcagtttgatgtgacacttaaaggttttgaaggggatccgactgttgtttttgatgaagctaaattcgtgaacttgcaacaaaatggcaagattgttgaaggagatgcgagtgtcaatgttaaagatggcgcttttttgaaccgtagtaaccgaattggaacgggatggattgacatgggaacagcctatggctatgctaaccaatatagacaagattctgaaatgaatacagccttgtatgtgaagttcacagttgacggcagaacatttgagaaaatatacccgatcaatccggctggtataacgaaggaagtcgatcataacggtatcaaaggcggctacctttacgacataaaagtgcgttggacgatcactccggactggggagattccacaatcgaattctatacgagagactgggttcataattccatcccggaaattgtattgtgattaaataggagagtataaaaatgaaagtatcgacaggtaaaatacacacaattatgaaaacgaaaaatatattcctgacagctatatctgcattgttcatctttgcagcatgtactgaagaaaaaataatggacgagccgggcgtttccggcaaaggcgatctcgtcatcgaactatccccctcttccgtcatcacaaaagctgctgcggaagataaaggatatgtgtatgcgacagaggaagaattgaatgtagaggattgctggatattcgtgtttggtgaagataaaaaatatattacgtctcagtatttttctggcgatgctttatcggaaactgagaatgaatatgtagatacccccgctccaaatggaggtagccagacgtataaaaaaggatatacaatcactttaaccggtttggattatggcacttatgacttttgggtcgtagccaatccgacagaggctaatgaagcttataaatcttgtcaatctctggatgcattgaaggagattattgaaggtggcgattcatatcaaactgcatttgcagagaaagctaaccagttggtgaaagtcggtaacaaatccgcaacatttaacttgacgactgtcgcttctccaatccagatcccgttaacacagttggctgcacgggtggaactgaaagtgcgggtggatattccgagacaattgaaaggtggagaatatgtgtatgagggtttccctaatgcaaatggagtacttactaatgcagaaattgataaattgacagggtcgcatatacgtaacgaggatgtaattaatagcgacttgcaacgaaaagatggcaatgacaactatctttatacttattttggacatcctgtaacaatttctggtggctcaaaagtaaaagctattagggttgataacgcattgaaggttactaagcagactatgtatagtggttatttattggataacataaagctgacagtagataatatacgtatcaaaagtgaattggaccctttatctgtagtagttgaccaacaacttggtagtagtgtgtttaatccgttggcagatgagatcagtacaacttatttgtttaaattttatacatataccaaagatgatttgacaataagtttgtcaggtgagcttcagaaggctgagtattcggtttcgcaaatgggaacattagataatgcgatgtttgtgaatgataaagaccttgcgttagttaagaaaattaataagggtgacgtcgaggatggtgaagttttgacatttgctggaggaggtggatggggaaatgctgctacaggcgtattgctctgtaatcaagatgcttggacagcagtagatgaggagattacaggtgagcctgtacttgaaggtgaacctaaagcgtattcctccggtagcataaccctgaaacccgaaggcggttttcaagtcggcaatatgtatgaagcatctgcattgatacagagtgttccggctacaggttctttaaatatagtgatagaaaatattcagtctggaggcgagatcaaattcggcttcaattaattaccaaagcgattattagtctttcaagggctatgccgaaacaactttgttcccgcgccaagcgtgtggagacaaggctgtttcggtatagcccttgaattttgatggaggtgtgccaatatcggtatcccccgtttttcagcagtttaaacctctatctccccgcaaactatcccgaatctccccacaaactaactcaaaccatgccataaactaattcatagcatattacatactctcgatagatagtacgacataacaccgataggtagtactacctattagcaattcatagtactacctatactttatacatagtactacctatcccaactttcctgtatgtcccggattagtttatggtatggttcgagttagtttccggtatgttttgtattagtttgtgcataaaataattgaaaaacatagaatatccgaaatataaaccttaccttgcaggaaatttaaaaactaatgctaatatgaaaataacgcaacttcgcggggacctggcggctttccgtaaccttgaactaagcattgtcttgaacgccatgaaaacggaaaatagccggaagccggtgaccaccttgcggcagaacattccttatctgactcccgggataaaaagccttgcagcagaaaagatacctgtagttttgtttggcgttacgctgaagcgggatgatgagaggatcggtgtggccacctatgcaggattggtgctgctcagtatcggcaacctgatcgattatgcggaggcggctgccatacgggaccgggcagcgggatttccgcagacactcgcttcgtttgtaggatcgagcggacggagcgttaaaatcgtggttccttttaccttgtcggacggttcgctgccaaagacggaaaggcatatgcgcctttttcacgcccatgcctgccttcgtgcaggacgctattacgaagcacagctccagttgcccgtcgaatggaaagaagaaggatgcccgacgccggaacaaggatgccgtgtgtcgtatgatcccgacctgtattataatccggatgccttgccgatccgcctggaacaacctttgcagatgcctgctcctgtgacgacacgcgaggcacacgatgccgagacggaccctctgttgcgcatggcgcccggctatgaacgctacaaacgcatatcgctcctttatgaaaccagccttaccgacacctttcggcaggtcgggccggaagacggtggcgatgaaggacggaaaaagttcatcgtgcatctggcgcgtaaatgccggcaatccgccatcccggaggaagatgccgtccgttttgccctgatacacccgttcggcagggagcaggagatggagttgagggcgacgttcgggaacgtctacaggaaagaaaaacattgcagcgtacggccctgtatgccccggcggatgctggtggcgatgcagatggaagagtttatgacaaggcgttatgagttgaggttcaaccggatgaagggatgcaaggagtatcgcgaacgacattcgctgtttacggactatcgcccggtgacggccgaggcggttaaaagcatctgtttcgaggcgcagttggaagggatatcggcaatcgaatatgacgtgcagcgttacgtggactcccggcgtgtttcccattactggccgatcgaggagttccttttcgatctgccgcattgggacgggcaggaccgcatccgtgcccttgccgattgtgtgccatgcgaaaacaaggagtggagggatttcttttatatttggttcctcagtatggtggcacactggttgcagatggacagggaacatgccaatagcacgtcacccctgttggtcgggccgcagggttgccgtaagagttctttttgccagagtcttctgccacccgaactgcggtcttactatgtcgatgggatcgacttgggaagccggaaggatgcggagatggcgttgaaccgtttcgcgctgatcaacctggatgagttcgactcgatacctgcttcccgtcagccttatttgaaaaacctgcttcagaaggcgaaagtgacgttgcgtaagccttatggcgagagcatggaggagatgaggcggttcgcttcgtttatcgcaacctccaatacgttctctttgctgaccgataccaccggcagccgccgttttatcggggtggaggtgaaggggatgatccggatagaacccatcgattatcctcaactctacgcccaggcggtcagtgccttgagggaaggtgaacgctattggtttaccccggaagaggaggtgcttttgaaccggaataaccggatgttcgaaaagcggcctttgctggaagagttgttcctccattatttccgtattccggaggaagaggaggtttgtgagccgttgtcagcacccgaaatattgatgacaatcagcaaacagagcaaaatagaccttacggaaacaaagctgaggttgttcggacaattaatgcaaaaatataatgtacggaagaagatgaaaaaagaccggaaatactattatgtcataccggaaacagaagaaccgggtgccgatgtaccggtcgggtgagtacatcgacatctgtatcgacaccaacatcgacacctgataatagataaataatcaggtggttgggttgaaaggtgtcgatgtgtagcatgataatcatttataaaaataatatagtatgagtatacaatacagatttgtccccatttatgataacctgaatgaggacagcgagaaagtaacgggtttttatcccaaagtagtcagccgtggcacaataaacaaagagcggatgtttgaagaaatatcgcacggttcgtcttccctccgttcggaactggcacgttcgtggatgctgatggaagactatatcatagatcggttgaaagatggttacgatgtctgcctgaacgatttttgcactttcggtatctccgccaaataccgtcgtgtagaccgcatcaacgaaatccgagccgaatccattttcgtaaagggcatgcatgtccgcacttcggaggtcgtcaataaaaaactcaaatgggcgcgtttcgagagggagtcggagaaatgaatcgatatgataatatttccgtgtgttaatcggtatttctatcgtcttgtccttttttcgtcggtatttatatcacgcggtccgttcttggtagctttgcccgtgaaacttgaaacgagcacctaccgcgcgtggtaaagacttattctatttttgtgtcgggataaactgtattatcccctttgctgtttaacatgggatagaaaaacgaaagataattaaaaatgaagtgtatgaaaaaagtacttttcctctttttgcttctagccggcatgacgaatgtctatgggcagaagtttgcggtaaagtcaaacttgctgtacgacgcgactgcaacgatcaacctcggtgttgaaatgggattgagcaagaagtggacactggacttgtccggtaactacaacggatggaagtttggcgacgacatgcgttggaaacattggatggttcagccggaagcgcgttattggttatgtgagaagtttaacggccattttctcggagtgcatgcccattatgccgattataatgtcggcgggatcaaattcctgagtaaaaatatggagaattatcgttatcagggcaacctctacggagccggtctgtcctatggttaccaatggctgctgagcaaccgttggagcatggaggctgtgatcggtgtcggatgggcgcatctggactatgataaatatccgtgcgcatcgtgcggtacggttcagaagagcgaaacgaaagactatttcggagtgacgaaggctgctctttctattatttactttattaaataatcggagcgatgaagaaaacaatgaaaatatatatggcagcagctttgctggctgtcgtttcgccggctatcctggctcaggccccggtaaaagtggtttgtaacgaactgaaacaaaaagggaacgaattggtgatcgacgccgtgatcacggtcgacggcagccggatcaaatctcgcgagaacctctccctgacaccggtcttggaatcggcttcgcagaaggaagggctgccttccatcctgctgaacggacggatcagtcagaaagtgtatgaccgcgagatcgctttgaacaacttgcaggatgaaccccgctttttggtcgtgcaggccggaaagagcgaaagcgtcatcaactataagacggtaatcccgtttgagccgtggatgaaagacgctcgcttcgtgctgatcccgaacatgtgcggttgtggaaaagaggaacagggtgctccgctcgtgatggccgacaaggtcctgacccgtcccgacaagcggtatgaggtgcagcctaccctggcttatatctctccggaagcagaaacggtaaaacatcgtgccgaggtggggactgcttatctggacttccaggtgggaaaatatgcgatcctgccggatttccgtaacaatgcgctggaactggcgaagatcgacaatacgatcagtacggttgtaaacgataagaacatcacgcttgaaggcattatcctgaaaggttttgcgtcgcccgaaggcagctacaagtccaatacggtcctggccggcaatcgtgtgaaagcgcttgccgaatatatacggaagaaacacgacttcaaaccggagctgtttacgttagataacggttcagaagattgggaaggtttgaaagcaaaagtagaggccgaccgtagcgttccttcgcgtgaggctgtgctggctatcatcaacagcaatgacgagccggacaagaaagacgccaggctggctgctttggacggaggggctccttaccgttatgtattgaagaatatctatccttcgttgcgccgttccgattaccgtgtcgcttatcaggtgcgtttctttacggtcgaagaaggacgcgagattatcaagatgcgtccgcagcagttgagtttgagcgaaatgttcgcggtggccaacagctacgagatcggaagcaaggaatataatgaagtgttcgagattgcggtccgcatgtacagcgacgatcctgtcgccaatctgaacgccgccaatatcgcattgtcgaagaacgatctggatgcggcccgtacttatctggctaaggctggcaatagccccgaagccatccatgcgcatggtgtcctgaacctgctggatgggaatttggatgaggcaggaaaactgctggaacaggcaaaagctgccggtgtgaaggaagcagcggccaatttggacgagttgcgtaagaaagaggccgataatcagctctttgatagctttgagtagtaagattgagacttttacagtgcaacctttgcggcattaacccatatctttgtaatatagagtttgcatataggagattgagaatttaaattattaagattatggaacgtatagtggatgtcgaaaaggttctgatgaacgagatagacaacctgcatggtgtctacttatatctcgaaggcgattcatggtgcgcgtatgaacgttctgcttattatctggccaagttgaatgtgccggtgatactacagaaagaagtaatccgcgaggggtacgatgtggttttgttgaaagcactgtttgcagtggatgacatgtgtttgccactggctcctaaaatggagttgaagagggtggcggatgacaagttgcagttccacatgtatgacgatattgatggttttcccgaatggaaagcttctcaattgaataagctgcctgcgtgacaggttgttgaatagcatttttattaaacagccgtgaggcttgaataaatactaagttgtaaaattgagggtgtattttgtcccgaaggctgatcgaaagatccccttcgggactttttattataagaatatttgaaacatacaaatgatgatttacatctgccaaaattgaactacattatttggagggtgcggtaaactatgatccgggcatccgctgagagggtgacggtgaagttgttaccggttgcctcgtttaacgtgccttgccaccaggctgtcagccggcggttgcggatgggccagcgcagcccggtggtggaaatcgtgccggaaggggcgagcgagaaaagggacacttgggttccgggtttactttccagtgttgtcgtttgaaggataggagtgaagatcccatagtctgaaagcatctctatccgttggaacagcggggcgtagtccatcagcaacgagatattgcctaacgtatggtcttcgcgcagcccggtagctcctaatatcagaatttcctgctgcccggaccgatgggcgaagcggacggatttcgtcaggtcgtttatttcctggtcctctacgatatggatgcggccggcatactgttcacgaaaacgggatgggatactgtcgaggtctccgacaatcgctgtcggagtgatgcctgctttatccaacgcctcgacggctccgtcacaagcgatgacgacggaggcttgatgcagaagatgaagcggtaaagctgtttgcggaaaacggccgtttgctacgactacgcaattataaggtgctatcatttgttcttattcctttctttttccaagtgtataatccggctgccgccagtatggcgtagcaaatatagagaaacattgtgggatagagcccacgcaggtaataaagatagacggacacgcagttgacgacgatccagaagatccagtgctcgacgatccggcgtgccagcatccaggtggcgacgattccgacggcggtggtaaaagcatcgcctgccggtatcggcgaatcggtgaaataatgcaggacataatagagtaacgcaaacagggcaacgatggaaaagctgatcccggcaaaaagacggagtgtcatattgcggtagaggattacttcctgaggagctgtctctatgtcttccgctgtttgttcttgcctgcccttgctgcgtgtccattgccagaaaccgtatatgctgatggctacataatagatgttcaatcccatatccgcatatatctttgaaaagaaaaagacaaaaacatagacaagggaagtcaggaagccgacaacccacatggcacggtgctgccttatctccagaaagagataaagcaggccggtcagtactccgaaatattccagtaattgttccatcatttagaatttgaatgttacccgtgccattgcgtttgttcccgcctgggtgaaatagccgtcttctttgtaacgttcgccgtcgaccattgccgagtatacccatgcattggtttcatattgctcgttgaacaaattgttgatcgtgacatcgagggcgatctccttcataaacttcggtttgaaaacgtagccgacacgcaggttgctgacgaaatagggatcgatggaacggtctttgcaagaggtgttgtcgatatactggcggccgacaaactgggagttgaaacttgcgctgaattgtttccagttgaaattgaacatgctgttggcgatgatgtctggcgaaaaggcgatgtcggttgtccctaagtcgttgtggtcctcacgcaggaagttccagtcggcatcgtaaacctcgatgctttcggtgaagttcttgatcttgttccggctgagtgtcaggtttccgctccagtccagccagcgggcgattttcacgcctcccgtgagttctattcccatccggtagctgtctttgatattggaagtgagggcttcgccgatttcgctgatcttgccggtcaggatcagctggttgctgtaatccatgaagtaaagattggcgccgacatggaaacgggagtttccgaaaccgtaacccgcttcatagtcgtagagcgtctcgtgctgcgggcgttcgtcccggccggcctcggtgaagttgtcccggttcggttcgcggttggctaccgagaacgagacgaacgcgttgtggccgtccttctggaagttaatgcccgccttggggttgaagaagttccagtgcttgtcgacattcacgtggtcgccggctttgtcgtcgctgccttcgatcgtgtagtggatgccccggtactgcatgtccagataaccgttcaggttgggatggaactggtaattggctttggcgtacatattgtaatccagcttgtcacccgtgttacggtaatattcgtagtccggttcgggaaggttgttcgattgtttcgcccacatgacacgcccgaagtggtcgccgtcgtaacggttgatggcggctccggctgagaattgcaaacgctctccccgatagttggcgctgtagatcgctccgtagaagtcgttttccagccacttgcggcggacgaggtccgtcttggcgatggtgtctccctggctgtcgatatatgggggcagtttgtagtccttgactttggctcctcctttataatcttcataatagcctgccccatgtgtgtaatggagtgtcaggttcatgttccacagatcgctcaggcgttggctggctgtcaggtggtagttctgctgccggtaattgtctgtttggttcttgtaatatttggtgaccccgtcttctttatattccccgcaagggttgtaggtgcggtctgaatccagcagataggaagggacgccggtccatgcctggtaggtcttctcgatgctgccgaaagtctggaagcgaatcagcgtgttgtctccgtagtaagccgccgaagcaaagtaagagtgcatgttggccttggcccggtcgatgtatccgtcgctctggatattggaatagcgggcatcgaaaacgaaatggtcctgtagaagcccggttccgagcttgacagtgttcttgactgtcccgaacgatccggccgagaccgaatattcggcataaggtttcaactccgatttctgcgtctgcatggcgacggttgctccgaaggcggctgccccgttggtcgaggtcccggctccgcgttgtatctggatattatcgaccgaagaggcaaagtctggcatgttcacccagaagaccgtgtgtgactcggagtcgtttaccggtactccgttgactgtgatgttgatacggttggcatccgtcccccggatgcggaaaccggaatagccgatacctgtccctgcatctgacgtcatgattacggacggcgattggaggatcaggaaggggatgccttgtccgtcgttccgacgattcagctcgtcctttgtcagttcgctgtaggcaaccggtgtccctttggctactttggttgcggtgacgaccacttcgtccagcgagatgtcttttgagattttcagagaatcggcaggtacggtcgttttgccttccgccgacaatgccattaatgttgaggcaataataagaacacttttcatcctttttctttttgataacctgaattttaaaaggaatagcagaggtggactgtttttactgaagatacacttttttcccttcgtcggcattacccgtacaggttcaatgggtataatctcagcctgccttcctgtttttgggcgtcattctggcaagcaccccttatattcgagggcaaaggaacgaaaaaaacgggtaatgaccaaatgttctgatatatgcttacatttgacatattaagtataaatgtacgcgataaatctcttaacatgcagaaaaaatatatatttatttgaaaactcactgattatttgtatatttgcagacgattaagcgaagatgaggagggggcgggcagtccccttcttttgttcttaactgtatgtatatgattgaaaaggacgtgataagtcagttggtagaagagaaattagcttcttccggcaattatttagtggatgtagtaataaaaccaggtaacctgattatcatagaaatagataatgatgagggtgtttgtatcgacgattgcgctgagttgagccgctatgtggaaggtcacctggaccgtgatgtggaagacttcgaactggaagtcggttccgcagggataacatctccgtttaaagtgcttcgccagtatgtgaaaaatataggtaacgaagtggaaatgttgcttaaaagcggtacgaagttgaccggcatattgaagtcggccgacgaaaacggggtggtggtcactgttgaaaaacaagtgaagcccgaaggagccaagcgtaaagtgactgtccgggaagaccagtcatatacattcgatgaaataaaatatacaaaatacctaataagattcaagtaaaaagattatggccaagaaagaggaaacaatcagtatgattgacacacttgctgagttcaaggagttgaaaaatatagataaagatacgatgatcagcgtgttggaagactcattccgcaacgtgatcgctaaaatgttcggtacggatgaaaattacgatgtaattatcaacccggaaaaaggtgacttcgaaatctggagaaaccgtacggttgtcgccgatgacgaactggaggacgagaatcttcagctgacactgaccgaggcccgtaagatcgatgccgactgtgaagtgggcgaagaggtgactgatgaagtgcattttgccgatttcggacgtcgtgccatcctgaacctgcgccagacgttggcttcaaaaatacttgaattgcagaaagacagtttgtttgctaagtataaggataaaatcggcaatatcatcgcagccgatgtttaccaggtatggaagaaggagatcctgttgttggatgacgagggtaatgagttgctgctcccgaaaacagaacagatcccgactgatttttaccgtaaaggtgaaaccgtgcgtgctatcgtacagcgggtggataactacaacaacaatccgaagatcatcctttcccgtacagacaaattgttcctgcagcgtttgttcgaacttgaagttccggaaatcaacgatggtctgatcaccatcaaggcgattgcccgtattccgggagagagagcaaaagtggccgttgagtcgtacgatgaccgtatcgacccggtcggcgcctgcgtcggaatgaaaggttcccgtattcatggtatcgttcgcgagctgagaaacgagaacatcgatgttattaactatacatccaatatatcgctgtttatccagcgtgcattaagcccggcaaaaatttcctctatacgagtgaacgaagaagaacataaggcagaggtttatcttcgtcctgaagaagtttcattggctatcggtaaaggtggtttgaatatcaagcttgcctgtatgctgaccgaatacgccatcgatgtcttccgcgatgtggaaggtgcagatgaagaggatatctatttggatgaattctcggacgaaattgacagctgggtaatcgaagcactgaagaatatcgggtgctacacggcgaagagcgtattggctatgaaccgcgaagagattgtagaacgtgccgacctcgaagaacagactgttgacgaggtacttgctatcttatctgccgaatttgaagaagaagagggagaacctcaagaataagtattacgacaaagtttgatatgcccataaaattaatacaagtacagagaaaattaaatgtaggaatcaacacggttgttgagtttctacgcaagaaagggttcgaggttgaggataacaatcccaacacgcgaatcggtgatgaacagtatgctttgctcgtaaaagagtttggaaaagatttaccgaacggcggacgtgagcgtgaacgggtcgtgcccgaacgctctcacagggaagcttcttctgtgaaagaagaaaagagttcggaaataaagactgtaataccggaagaattcagacccaaaattgtgacgaagggtcggatcgatctggacagaccgcataaaaaagtgcaggaggtgcagcatcagcctgtttccgttcctgtggaaaagaaagtggagaagcctgtggaggcggccactgctgcaaaaactgctgatgctccggttgaggaggtgaaaacccccgaagtaaaggcacctgaggtggaaatacctgaagtgaaaatcccggaaatgaaacagcagcctgaggagataaaagaagaaaaagttatagtagtggaaaaggaaccagcagaagtgatgaaaccggagcctgtacaggagccgaaaactgcaaatgtagagtcaacgactgcgactgcagaaccggcggcatctgccggcaacgattctgacgagggattattccggttgaatactccgaagttcgagtcgaaaatcaaggtgacagggaagatagatctgaacgcgttgaatcagtctacccgtccgaagaaaaagacgaaggaggaacgcaagaaagagcgggaagacaagcgcgagaagttcgccggtaacaaagcggggcaacagtcgggtaacgggcttttcaataaaggaccgaaagacggaacggcaagaccaggtgctcctgtcaaaccgggagaaggcggtacggatgcaaagaaaaaacgtaaccgtatcaagaaagaccgcgtagatgtgaacaatacgccgggaactaatgcacgcccgtcacgtccgaacgatgatcgcaagccgcgcctacgcaagccggtgaaggcggaaatcagcgaggaagatgtacagaagcaggtaaaggaaaccttggcccgtctgaccaacaagggaaataagaataataaaggtgccaagtaccgtcgcgacaaacgcgatgccatccagaagcgtgaacacgaactgatggaacaggaagaaatggaaagcaaggtgttgaagctgacggagtttgtgactgccaatgaccttgccaacatgatggacgttcctgtgacgcaggttatcggtacttgtatgagtatcggtatcatggtttccattaaccagcgtctggatgcggaaacaattaatatcgtagctgaagaattcggtttccagaccgaatatgtaagtgccgaagtggtggaagccatcaaggccgacgaagaagacgacaacgaagaagactgggtggcgcgtcctcctatcgtgactgtgatgggacacgttgaccacggtaagacctctttgttggataatatccgtaatgcaaacgtaattgccggtgaggcaggaggtatcacgcagcacatcggtgcttacaacgtgaagttgcagagcgggcgtcgtatcacgttcctggatacgccgggccatgaggcttttaccgccatgcgtgcccgtggtgccaaggtgacggatatcgcgattatcattgtggctgccgacgataatgtcatgccacagactgtcgaagcgatcaaccatgcttcggctgctggtgtacctatcgtatttgctatcaataagatcgacaagcctcatgccaatcctgacaagatcaaggaggaactggctaacatgaattatttggttgaagactggggaggtaagtaccagagccaggaaatttcagccaagaaaggtatcggtgtggaggacttgttggaaaaagtattgttggaagccgatttgctcgacttgaaggctaatccgaagagacgtgctgttggttccatcatcgaatcttcacttgacaaaggacgtggatatgtttctaccgtgttggttgaaaacggaacactgaaggtcggtgacatcgtactggccggaacccatttcggtcgcgtaaaagcgatgttcaacgaacgtaaccagcgtatcgaaaaggctggtccttccgaaccggctctgatcctcggtctgaacggtgctccgcaggctggcgatacgttcaacgtactggaaacagaccaggaagcccgcgaaattgccaaccgtcgcgaacagttgcagcgtgagttgggcctacgtacgcagaagatgcttacgctggatgatatcggtcgccgtatcgcagtcggaaacttccaagaactgaacgtgattgtgaagggtgacgtggacggttccgtagaagcgttgtcagactccctgatccgtctgtctacagaggaaatccaggtgaacgtgatccacaaggctgtcggtcagatctccgaatcggatgtcgtactggctgccgcttctgatgcgattattatcggattccaggtgcgcccggcattgcctgcacgccgcctggcagagaaagagggagttgaaatccgtctgtactcgattatctatgatgcgatcgaagaagtgaagagcgctatggaaggtatgctttcaccggaaatcaaggaagagatcactgcgaacgtggaagtgcttcaggtcttcaagatcacgaaagtgggtacgattgccgggtgtatggtacgtgaaggtaagatcaagcgttcgaacaaggtgcgcgtgatccgtgacggtatcgtggttcattccggagagttggaatctttgaaacgtttcaaggatgatgtgaaggaagtggttgccggtttggattgtggtttgaacattgtcaactacaatgatattcaggttggtgatatcatcgaggcatacgaagaaacggaaatcaagaagacattgtaaacatgaactggttggacattacattgctatgtctggcaggaataggatttgtgaaaggcctgtttgatggagtcatcaaacaggttgtttcgcttatagcccttttggtcgggatctttttttgtacgaaggcggcactttggctgcgtggatatatattggcattgggctggtttcccgaacaaggagtgacggtgctcagctacgtggcgggtttcctgttgatcgtgggtgtcatattgctggcgggtgagattctgactcgtgtcgtgggagcgacgccgctgagcgtcctgaaccatttggtgggtggtgtcttggggctttgctttatgatggcgtttgtcagccttctgctgaacagtatggagatgatagacaagggatcggtcctgatcccgcgccaggcaaaggtcgaatcccgtttttataattcagtcaaagaaataatcccaaccatttacttccaaaatttgttttttaaggaggaataggtttcataatttgaacaatatatttaatgtataatggaagattcaaacgacatactaaatgaggtgacgaccggtgattataagtacggattcgttaccgatatagatacggaggtgattcatcgcggattggatgaagagactgttcgtattatttccgccaagaagaatgaaccggaatggctgcttgagttccgcttgaaagccttccgccattggcagacactggagatgccgacatggcctcacctgaatatcccgccgatcgactatcaggatatcatctactatgccgctccgaagaagaaggaaggcccgaagagcctggatgaggtcgatccggaactgatgaagactttcgacaaactgggtattcctttgcacgaacgtgcgcagcttagcgggatggcggtcgatgcagtgatggacagcgtctccgtaaagacaacattcaaggagacgcttgctgagaagggcattatcttctgttctttcagcgaagccgtccagcatcatcccgatttggtccagaagtatctgggaagcgtggtcagttatcgtgataatttctttgccgcattgaattcggcggtgttctcggacggttcgtttgtctatatcccgaaaggcgtgcgttgtccgatggagctttctacctatttccgtatcaatgcggccaataccggacagttcgaacgtacattgattgtggcggatgatgaagcctatgtcagttaccttgaaggttgtaccgccccgatgcgcgatgagaaccagcttcatgcggctatcgtcgaaatcgtagcgcatgaacgggccgaagtgaaatattccaccgtccagaactggtatccgggtgacaaggatggaaagggaggtatctacaacttcgtgactaaacgcggactgtgcaagggcgaagggagcaagatctcttggacacaggtggagactggttccgctattacctggaaatacccaagctgtattctggccggtgataattcggtaggcgagttttactcggtggccgtcaccaacaattaccagcaggccgacaccggtacgaagatgatccaccttggacggaatactcgcagtacgatcgtctcgaaaggtatctccgccgggcatagtcagaacagctatcgcggcttggtgaaagtttctccccgtgccgaaggcgcccgtaatcatagccagtgcgacagcctgttgcttagttcgacttgcggtgcccataccttcccctatgccgatatccagaacgagacggcggtagtggaacacgaagcgacgacgagcaagatcagcgaagaacagttgttctattgccggcagcgcggtatctcggtcgaggaagctgtcggtctgatcgtcaacgggtatgcccgcgaggtaatgaacaagctccctatggagtttgccgtggaggcacagaagctgctgactatttctttagaaggaagcgtaggatgattttatgatttatgatttatgatttatgcgtcgatgataaatcataaatcataaatcataaatcgcataaatcataaattataaagtcatgttagagataaagaacttacatgccaatatcaatggcaaagagatattgaaaggaatcaacctttctgtcaaggcgggtgaggtacacgccatcatggggccgaacggttccgggaaaagtaccttgagcagtgtgttggtcggtaatccggcattcgaagtaacggaaggggaggtgatcttcaacggtaagaacctgttggatctcgaaccggaagaccgtagccgtgaaggtattttcctgagtttccagtatccggtggagattccgggagtcagcatggtgaacttcatgcgtgccgccttgaacgaacatcgtaaatataaagggctggaacctgtttcggctaccgacttcctgaagctgatgcgcgagaagcgtgcgattgtggaattggacaataagctggcgagccgcagcgtgaacgaaggtttttcgggtggtgagaagaagcggaacgaaatcttccagatggcgatgctcgaaccgaagctggcgattctcgatgagacggatagcggtctggatatcgatgccctccgcatcgtggcaaatggtgtcaaccaacttcgtacgccagagaatgcggctatcgtgatcacgcactaccaacgtctgctggattatatcaagcctgacgtggttcatgtcctctacaaaggacgtattgtcaaaaccgccggtcccgaactggctctcgaactcgaagaaaaaggctacgactggatcaagaaagagatgggagaagaataagaataattaggcacggattacacgcgaaatccgtgtaatccatgccaaaaaa
